(19) United States
(12) Patent Application Publication
(10) Pub. No.: US 2004/0018510 A1
(43) Pub. Date: Jan. 29, 2004

(54) Human calcium channel compositions and methods

(75) Inventors: Michael M. Harpold, El Cajon, CA (US); Steven B. Ellis, San Diego, CA (US); Mark E. Williams, Carlsbad, CA (US); Ann F. McCue, La Mesa, CA (US); Alison Gillespie, San Diego, CA (US); Daniel H. Feldman, Gainesville, FL (US); Robert Brenner, Austin, TX (US)

Correspondence Address: Merck & Co., Inc., Patent Department, P.O. Box 2000 - RY60-30, Rahway, NJ, 07065-0907, US

(73) Assignee: Merck & Co., Inc.

(21) Appl. No.: 10/375,253

(22) Filed: Feb. 27, 2003

Related U.S. Application Data
(63) Continuation-in-part of application No. 08/404,354, filed on Feb. 15, 1995, now Pat. No. 5,618,720.
Application No. 08/404,354 is a continuation of application No. 08/314,083, filed on Sep. 28, 1994, now Pat. No. 5,686,241.
Application No. 08/314,083 is a division of application No. 07/914,231, filed on Jul. 13, 1992, now Pat. No. 5,407,820.
Application No. 08/314,083 is a division of application No. 07/914,231, filed on Jul. 13, 1992, now Pat. No. 5,407,820.
Application No. 07/914,231 is a continuation of application No. 07/603,751, filed on Nov. 8, 1990, now abandoned.

(51) Int. Cl. C12Q 1/68; C07H 21/04; C07K 14/705

(52) U.S. Cl. 435/6; 435/69.1; 435/320.1; 435/325; 530/350; 530/388.1; 536/23.5

(57) ABSTRACT

Isolated DNA encoding each of human calcium channel α₁-, α₂-, β- and γ-subunits, including subunits that arise as splice variants of primary transcripts, is provided. Cells and vectors containing the DNA and methods for identifying compounds that modulate the activity of human calcium channels are also provided.

[0001] This application is a continuation-in-part of U.S. application Ser. No. 08/404,354, filed Feb. 15, 1995, which is a continuation of U.S. application Ser. No. 07/914,231, filed Jul. 13, 1992, now U.S. Pat. No. 5,407,820, and also of U.S. application Ser. No. 08/314,083, filed Sep. 28, 1994, which is a divisional of U.S. application Ser. No. 07/914,231. U.S. application Ser. No. 07/914,231 is a continuation of U.S. application Ser. No. 07/603,751, filed Nov. 8, 1990, now abandoned, which is the national stage of International PCT Application PCT/US89/01408, filed Apr. 4, 1989, which is a continuation-in-part of U.S. application Ser. No. 07/176,899, filed Apr. 4, 1988, now abandoned.

[0002] This application is also a continuation-in-part of U.S. application Ser. No. 08/290,012, filed Aug. 11, 1994, which is a continuation-in-part of U.S. application Ser. No. 08/149,097, filed Nov. 5, 1993, and a continuation-in-part of U.S. application Ser. No. 08/105,536, filed Aug. 11, 1993. U.S. application Ser. No. 08/149,097 is a continuation-in-part of U.S. Application Ser. No. 08/105,536, which is a continuation-in-part of the above-mentioned U.S. application Ser. No. 07/603,751, filed Nov. 8, 1990.

[0003] This application is also a continuation-in-part of U.S. application Ser. No. 08/223,305, filed Apr. 4, 1994, which is a continuation of U.S. application Ser. No. 07/868,354, which is a continuation-in-part of allowed U.S. application Ser. No. 07/745,206, filed Aug. 15, 1991, which is a continuation-in-part of the above-mentioned U.S. application Ser. No. 07/603,751, filed Nov. 8, 1990, and a continuation-in-part of U.S. application Ser. No. 07/620,250, filed Nov. 30, 1990, now abandoned. This application is, thus, also a continuation-in-part of U.S. application Ser. Nos. 08/149,097, 08/105,536, 07/914,231 07/868,354, and 07/745,206.

[0004] This application is also a continuation-in-part of U.S. application Ser. No. 08/311,363, filed Sep. 23, 1994, which is a continuation of allowed U.S. application Ser. No. 07/745,206, filed Aug. 15, 1991.

[0005] This application is also a continuation-in-part of U.S. application Ser. No. 08/193,078, filed Feb. 7, 1994, which is the National Stage of International PCT Application No. PCT/US92/06903, filed Aug. 14, 1992 and which is a continuation-in-part of U.S. application Ser. Nos. 07/868,354, 07/745,206, 07/603,751, 07/176,899, 07/620,250, filed Nov. 30, 1990, now abandoned, and U.S. Ser. No. 07/482,384, now U.S. Pat. No. 5,386,025, filed Feb. 2, 1990.

[0006] This application is also a continuation-in-part of U.S. application Ser. No. 08/336,257, filed Nov. 7, 1994, which is a continuation of U.S. Ser. No. 07/482,384, now U.S. Pat. No. 5,386,025, filed Feb. 2, 1990.

[0007] The subject matter of each of U.S. application Ser. Nos. 08/404,354, 08/336,257, 08/314,083, 08/311,363, 08/290,012, 08/193,078, 08/149,097, 08/105,536, 07/914,231, 07/620,250, 07/603,751, 07/482,384, and 07/176,899 is incorporated herein in its entirety.

### TECHNICAL FIELD

[0008] The present invention relates to molecular biology and pharmacology. More particularly, the invention relates to calcium channel compositions and methods of making and using the same.

### BACKGROUND OF THE INVENTION

[0009] Calcium channels are membrane-spanning, multi-subunit proteins that allow controlled entry of Ca²⁺ ions into cells from the extracellular fluid. Cells throughout the animal kingdom, and at least some bacterial, fungal and plant cells, possess one or more types of calcium channel.

[0010] The most common type of calcium channel is voltage dependent. All “excitable” cells in animals, such as neurons of the central nervous system (CNS), peripheral nerve cells and muscle cells, including those of skeletal muscles, cardiac muscles, and venous and arterial smooth muscles, have voltage-dependent calcium channels. “Opening” of a voltage-dependent channel to allow an influx of Ca²⁺ ions into the cells requires a depolarization to a certain level of the potential difference between the inside of the cell bearing the channel and the extracellular environment bathing the cell. The rate of influx of Ca²⁺ into the cell depends on this potential difference.

[0011] Multiple types of calcium channels have been identified in mammalian cells from various tissues, including skeletal muscle, cardiac muscle, lung, smooth muscle and brain, [see, e.g., Bean, B. P. (1989) Ann. Rev. Physiol. 51:367-384 and Hess, P. (1990) Ann. Rev. Neurosci. 56:337]. The different types of calcium channels have been broadly categorized into four classes, L-, T-, N-, and P-type, distinguished by current kinetics, holding potential sensitivity and sensitivity to calcium channel agonists and antagonists.

[0012] Calcium channels are multisubunit proteins that contain two large subunits, designated α₁ and α₂, which have molecular weights between about 130 and about 200 kilodaltons (“kD”), and one to three different smaller subunits of less than about 60 kD in molecular weight. At least one of the larger subunits and possibly some of the smaller subunits are glycosylated. Some of the subunits are capable of being phosphorylated. The α₁ subunit has a molecular weight of about 150 to about 170 kD when analyzed by sodium dodecylsulfate (SDS)-polyacrylamide gel electrophoresis (PAGE) after isolation from mammalian muscle tissue and has specific binding sites for various 1,4-dihydropyridines (DHPs) and phenylalkylamines. Under non-reducing conditions (in the presence of N-ethyl-maleimide), the α₂ subunit migrates in SDS-PAGE as a band corresponding to a molecular weight of about 160-190 kD. Upon reduction, a large fragment and smaller fragments are released. The β subunit of the rabbit skeletal muscle calcium channel is a phosphorylated protein that has a molecular weight of 52-65 kD as determined by SDS-PAGE analysis. This subunit is insensitive to reducing conditions. The γ subunit of the calcium channel appears to be a glycoprotein with an apparent molecular weight of 30-33 kD, as determined by SDS-PAGE analysis.

[0013] In order to study calcium channel structure and function, large amounts of pure channel protein are needed. Because of the complex nature of these multisubunit proteins, the varying concentrations of calcium channels in tissue sources of the protein, the presence of mixed populations of calcium channels in tissues, difficulties in obtaining tissues of interest, and the modifications of the native protein that can occur during the isolation procedure, it is extremely difficult to obtain large amounts of highly purified, completely intact calcium channel protein.

[0014] Characterization of a particular type of calcium channel by analysis of whole cells is severely restricted by the presence of mixed populations of different types of calcium channels in the majority of cells. Single-channel recording methods that are used to examine individual calcium channels do not reveal any information regarding the molecular structure or biochemical composition of the channel. Furthermore, in performing this type of analysis, the channel is isolated from other cellular constituents that might be important for natural functions and pharmacological interactions.

[0015] Characterization of the gene or genes encoding calcium channels provides another means of characterization of different types of calcium channels. The amino acid sequence determined from a complete nucleotide sequence of the coding region of a gene encoding a calcium channel protein represents the primary structure of the protein. Furthermore, secondary structure of the calcium channel protein and the relationship of the protein to the membrane may be predicted based on analysis of the primary structure. For instance, hydropathy plots of the α₁ subunit protein of the rabbit skeletal muscle calcium channel indicate that it contains four internal repeats, each containing six putative transmembrane regions (Tanabe, T. et al. (1987) Nature 328:313].

[0016] Because calcium channels are present in various tissues and have a central role in regulating intracellular calcium ion concentrations, they are implicated in a number of vital processes in animals, including neurotransmitter release, muscle contraction, pacemaker activity, and secretion of hormones and other substances. These processes appear to be involved in numerous human disorders, such as CNS and cardiovascular diseases. Calcium channels, thus, are also implicated in numerous disorders. A number of compounds useful for treating various cardiovascular diseases in animals, including humans, are thought to exert their beneficial effects by modulating functions of voltage-dependent calcium channels present in cardiac and/or vascular smooth muscle. Many of these compounds bind to calcium channels and block, or reduce the rate of, influx of Ca²⁺ into the cells in response to depolarization of the cell membrane.

[0017] The results of studies of recombinant expression of rabbit calcium channel α₁ subunit-encoding cDNA clones and transcripts of the cDNA clones indicate that the α₁ subunit forms the pore through which calcium enters cells. The relevance of the barium currents generated in these recombinant cells to the actual current generated by calcium channels containing as one component the respective α₁ subunits in vivo is unclear. In order to completely and accurately characterize and evaluate different calcium channel types, however, it is essential to examine the functional properties of recombinant channels containing all of the subunits as found in vivo.

[0018] In order to conduct this examination and to fully understand calcium channel structure and function, it is critical to identify and characterize as many calcium channel subunits as possible. Also in order to prepare recombinant cells for use in identifying compounds that interact with calcium channels, it is necessary to be able to produce cells that express uniform populations of calcium channels containing defined subunits.

[0019] An understanding of the pharmacology of compounds that interact with calcium channels in other organ systems, such as the CNS, may aid in the rational design of compounds that specifically interact with subtypes of human calcium channels to have desired therapeutic effects, such as in the treatment of neurodegenerative and cardiovascular disorders. Such understanding and the ability to rationally design therapeutically effective compounds, however, have been hampered by an inability to independently determine the types of human calcium channels and the molecular nature of individual subtypes, particularly in the CNS, and by the unavailability of pure preparations of specific channel subtypes to use for evaluation of the specificity of calcium channel-effecting compounds. Thus, identification of DNA encoding human calcium channel subunits and the use of such DNA for expression of calcium channel subunits and functional calcium channels would aid in screening and designing therapeutically effective compounds.

[0020] Therefore, it is an object herein, to provide DNA encoding specific calcium channel subunits and to provide eukaryotic cells bearing recombinant tissue-specific or subtype-specific calcium channels. It is also an object to provide assays for identification of potentially therapeutic compounds that act as calcium channel antagonists and agonists.

### SUMMARY OF THE INVENTION

[0021] Isolated and purified nucleic acid fragments that encode human calcium channel subunits are provided. DNA encoding α₁ subunits of a human calcium channel, and RNA, encoding such subunits, made upon transcription of such DNA are provided. In particular, DNA fragments encoding α₁ subunits of voltage-dependent human calcium channels (VDCCs) type A, type B (also referred to as VDCC IV), type C (also referred to as VDCC II) type D (also referred to as VDCC III) and type E are provided.

[0022] DNA encoding α_{1A}, α_{1B}, α_{1C}, α_{1D} and α_{1E} subunits is provided. DNA encoding an α_{1D} subunit that includes the amino acids substantially as set forth as residues 10-2161 of SEQ ID No. 1 is provided. DNA encoding an α_{1D} subunit that includes substantially the amino acids set forth as amino acids 1-34 in SEQ ID No. 2 in place of amino acids 373-406 of SEQ ID No. 1 is also provided. DNA encoding an α_{1C} subunit that includes the amino acids substantially as set forth in SEQ ID No. 3 or SEQ ID No. 6 and DNA encoding an α_{1B} subunit that includes an amino acid sequence substantially as set forth in SEQ ID No. 7 or in SEQ ID No. 8 is also provided.

[0023] DNA encoding α_{1A} subunits is also provided. Such DNA includes DNA encoding an α_{1A} subunit that has substantially the same sequence of amino acids as encoded by the DNA set forth in SEQ ID No. 22 or No. 23 or other splice variants of α_{1A} that include all or part of the sequence set forth in SEQ ID No. 22 or 23. The sequence set forth in SEQ ID NO. 22 is a splice variant designated α_{1A-1}; and the sequence set forth in SEQ ID NO. 23 is a splice variant designated α_{1A-2}. DNA encoding α_{1A} subunits also include DNA encoding subunits that can be isolated using all or a portion of the DNA having SEQ ID NO. 21, 22 or 23 or DNA obtained from the phage lysate of an E. coli host containing DNA encoding an α_{1A} subunit that has been deposited in the American Type Culture Collection, 12301 Parklawn Drive, Rockville, Md. 20852 U.S.A. under Accession No. 75293 in accord with the Budapest Treaty. The DNA in such phage includes a DNA fragment having the sequence set forth in SEQ ID No. 21. This fragment selectively hybridizes under conditions of high stringency to DNA encoding α_{1A} but not to DNA encoding α_{1B} and, thus, can be used to isolate DNA that encodes α_{1A} subunits.

[0024] DNA encoding α_{1E} subunits of a human calcium channel is also provided. This DNA includes DNA that encodes an α_{1E} splice variant designated α_{1E-1} encoded by the DNA set forth in SEQ ID No. 24, and a variant designated α_{1E-3} encoded by SEQ ID No. 25. This DNA also includes other splice variants thereof that encodes sequences of amino acids encoded by all or a portion of the sequences of nucleotides set forth in SEQ ID Nos. 24 and 25 and DNA that hybridizes under conditions of high stringency to the DNA of SEQ ID. No. 24 or 25 and that encodes an α_{1E} splice variant.

[0025] DNA encoding α₂ subunits of a human calcium channel, and RNA encoding such subunits, made upon transcription of such a DNA are provided. DNA encoding splice variants of the α₂ subunit, including tissue-specific splice variants, are also provided. In particular, DNA encoding the α₂ₐ-α₂ₑ subunit subtypes is provided. In particularly preferred embodiments, the DNA encoding the α₂ subunit that is produced by alternative processing of a primary transcript that includes DNA encoding the amino acids set forth in SEQ ID 11 and the DNA of SEQ ID No. 13 inserted between nucleotides 1624 and 1625 of SEQ ID No. 11 is provided. The DNA and amino acid sequences of α₂ₐ-α₂ₑ are set forth in SEQ ID. Nos. 11 (α_{2b}), 29 (α₂ₐ) and 30-32 (α_{2c}-α₂ₑ, respectively), respectively.

[0026] Isolated and purified DNA fragments encoding human calcium channel β subunits, including DNA encoding β₁, β₂, β₃ and β₄ subunits, and splice variants of the β subunits are provided. RNA encoding β subunits, made upon transcription of the DNA is also provided.

[0027] DNA encoding a β₁ subunit that is produced by alternative processing of a primary transcript that includes DNA encoding the amino acids set forth in SEQ ID No. 9, but including the DNA set forth in SEQ ID No. 12 inserted in place of nucleotides 615-781 of SEQ ID No. 9 is also provided. DNA encoding β₁ subunits that are encoded by transcripts that have the sequence set forth in SEQ ID No. 9 including the DNA set forth in SEQ ID No. 12 inserted in place of nucleotides 615-781 of SEQ ID No. 9, but that lack one or more of the following sequences of nucleotides: nucleotides 14-34 of SEQ ID No. 12, nucleotides 13-34 of SEQ ID No. 12, nucleotides 35-55 of SEQ ID No 12, nucleotides 56-190 of SEQ ID No. 12 and nucleotides 191-271 of SEQ ID No. 12 are also provided. In particular, β₁ subunit splice variants β₁₋₁β₁₋₅ (see, SEQ ID Nos. 9, 10 and 33-35) described below, are provided.

[0028] β₂ subunit splice variants β_{2c}-β₂ₑ, that include all or a portion of SEQ ID Nos. 26, 37 and 38 are provided; β₃ subunit splice variants, including β₃ subunit splice variants that have the sequences set forth in SEQ ID Nos 19 and 20, and DNA encoding the β₄ subunit that includes DNA having the sequence set forth in SEQ ID No. 27 and the amino acid sequence set forth in SEQ ID No. 28 are provided.

[0029] Also Escherichia coli (E. coli) host cells harboring plasmids containing DNA encoding β₃ have been deposited in accord with the Budapest Treaty under Accession No. 69048 at the American Type Culture Collection. The deposited clone encompasses nucleotides 122-457 in SEQ ID No. 19 and 112-447 in SEQ ID No. 20.

[0030] DNA encoding β subunits that are produced by alternative processing of a primary transcript encoding a β subunit, including a transcript that includes DNA encoding the amino acids set forth in SEQ ID No. 9 or including a primary transcript that encodes β₃ as deposited under ATCC Accession No. 69048, but lacking and including alternative exons are provided or may be constructed from the DNA provided herein.

[0031] DNA encoding γ subunits of human calcium channels is also provided. RNA, encoding γ subunits, made upon transcription of the DNA are also provided. In particular, DNA containing the sequence of nucleotides set forth in SEQ ID No. 14 is provided.

[0032] Full-length DNA clones and corresponding RNA transcripts, encoding α₁, including splice variants of α_{1A}, α_{1D}, α_{1B}, α_{1C}, and α_{1E}, α₂ and β subunits, including β₁₋₁-β₁₋₅, β_{2C}, β_{2D}, β_{2E}, β₃₋₁ and β₄ of human calcium channels are provided. Also provided are DNA clones encoding substantial portions of the certain α_{1C} subtype subunits and γ subunits of voltage-dependent human calcium channels for the preparation of full-length DNA clones encoding the corresponding full-length subunits. Full-length clones may be readily obtained using the disclosed DNA as a probe as described herein.

[0033] The α_{1A} subunit, α_{1C} subunit, α_{1E} subunit and splice variants thereof, the β_{2D}, β_{2C} and β_{2E} subunits and β₄ subunits and nucleic acids encoding these subunits are of particular interest herein.

[0034] Eukaryotic cells containing heterologous DNA encoding one or more calcium channel subunits, particularly human calcium channel subunits, or containing RNA transcripts of DNA clones encoding one or more of the subunits are provided. A single α₁ subunit can form a channel. The requisite combination of subunits for formation of active channels in selected cells, however, can be determined empirically using the methods herein. For example, if a selected α₁ subtype or variant does not form an active channel in a selected cell line, an additional subunit or subunits can be added until an active channel is formed.

[0035] In preferred embodiments, the cells contain DNA or RNA encoding a human α₁ subunit, preferably at least an α_{1D}, α_{1B}, α_{1A} or α_{1E} subunit. In more preferred embodiments, the cells contain DNA or RNA encoding additional heterologous subunits, including at least one β, α₂ or γ subunit. In such embodiments, eukaryotic cells stably or transiently transfected with any combination of one, two, three or four of the subunit-encoding DNA clones, such as DNA encoding any of α₁, α₁+β, α₁+β+α₂, are provided.

[0036] The eukaryotic cells provided herein contain heterologous DNA that encodes an α₁ subunit or heterologous DNA that encodes an α₁ subunit and heterologous DNA that encodes a β subunit. At least one subunit is selected from among and α_{1A-1}, α_{1A-2}, α_{1C-2}, α_{1E-1}, α_{1E-3}, β_{2C}, β_{2D}, β_{2F}, a β₃₋₁, β₃₋₂, subunit or a β₄ subunit.

[0037] In preferred embodiments, the cells express such heterologous calcium channel subunits and include one or more of the subunits in membrane-spanning heterologous calcium channels. In more preferred embodiments, the eukaryotic cells express functional, heterologous calcium channels that are capable of gating the passage of calcium channel-selective ions and/or binding compounds that, at physiological concentrations, modulate the activity of the heterologous calcium channel. In certain embodiments, the heterologous calcium channels include at least one heterologous calcium channel subunit. In most preferred embodiments, the calcium channels that are expressed on the surface of the eukaryotic cells are composed substantially or entirely of subunits encoded by the heterologous DNA or RNA. In preferred embodiments, the heterologous calcium channels of such cells are distinguishable from any endogenous calcium channels of the host cell. Such cells provide a means to obtain homogeneous populations of calcium channels. Typically, the cells contain the selected calcium channel as the only heterologous ion channel expressed by the cell.

[0038] In certain embodiments the recombinant eukaryotic cells that contain the heterologous DNA encoding the calcium channel subunits are produced by transfection with DNA encoding one or more of the subunits or are injected with RNA transcripts of DNA encoding one or more of the calcium channel subunits. The DNA may be introduced as a linear DNA fragment or may be included in an expression vector for stable or transient expression of the subunit-encoding DNA. Vectors containing DNA encoding human calcium channel subunits are also provided.

[0039] The eukaryotic cells that express heterologous calcium channels may be used in assays for calcium channel function or, in the case of cells transformed with fewer subunit-encoding nucleic acids than necessary to constitute a functional recombinant human calcium channel, such cells may be used to assess the effects of additional subunits on calcium channel activity. The additional subunits can be provided by subsequently transfecting such a cell with one or more DNA clones or RNA transcripts encoding human calcium channel subunits.

[0040] The recombinant eukaryotic cells that express membrane spanning heterologous calcium channels may be used in methods for identifying compounds that modulate calcium channel activity. In particular, the cells are used in assays that identify agonists and antagonists of calcium channel activity in humans and/or assessing the contribution of the various calcium channel subunits to the transport and regulation of transport of calcium ions. Because the cells constitute homogeneous populations of calcium channels, they provide a means to identify agonists or antagonists of calcium channel activity that are specific for each such population.

[0041] The assays that use the eukaryotic cells for identifying compounds that modulate calcium channel activity are also provided. In practicing these assays the eukaryotic cell that expresses a heterologous calcium channel, containing at least one subunit encoded by the DNA provided herein, is in a solution containing a test compound and a calcium channel selective ion, the cell membrane is depolarized, and current flowing into the cell is detected. If the test compound is one that modulates calcium channel activity, the current that is detected is different from that produced by depolarizing the same or a substantially identical cell in the presence of the same calcium channel-selective ion but in the absence of the compound. In preferred embodiments, prior to the depolarization step, the cell is maintained at a holding potential which substantially inactivates calcium channels which are endogenous to the cell. Also in preferred embodiments, the cells are mammalian cells, most preferably HEK cells, or amphibian oöcytes.

[0042] Nucleic acid probes, typically labeled for detection, containing at least about 14, preferably 16, or, if desired, 20 or 30 or more, contiguous nucleotides of α_{1D}, α_{1C}, α_{1B}, α_{1A} and α_{1E}, α₂, β, including β₁, β₂, β₃ and β₄ splice variants and γ subunit-encoding DNA are provided. Methods using the probes for the isolation and cloning of calcium channel subunit-encoding DNA, including splice variants within tissues and inter-tissue variants are also provided.

[0043] Purified human calcium channel subunits and purified human calcium channels are provided. The subunits and channels can be isolated from a eukaryotic cell transfected with DNA that encodes the subunit.

[0044] In another embodiment, immunoglobulins or antibodies obtained from the serum of an animal immunized with a substantially pure preparation of a human calcium channel, human calcium channel subunit or epitope-containing fragment of a human calcium subunit are provided. Monoclonal antibodies produced using a human calcium channel, human calcium channel subunit or epitope-containing fragment thereof as an immunogen are also provided. E. coli fusion proteins including a fragment of a human calcium channel subunit may also be used as immunogen. Such fusion proteins may contain a bacterial protein or portion thereof, such as the E. coli TrpE protein, fused to a calcium channel subunit peptide. The immunoglobulins that are produced using the calcium channel subunits or purified calcium channels as immunogens have, among other properties, the ability to specifically and preferentially bind to and/or cause the immunoprecipitation of a human calcium channel or a subunit thereof which may be present in a biological sample or a solution derived from such a biological sample. Such antibodies may also be used to selectively isolate cells that express calcium channels that contain the subunit for which the antibodies are specific.

[0045] Methods for modulating the activity of ion channels by contacting the calcium channels with an effective amount of the above-described antibodies are also provided.

[0046] A diagnostic method for determining the presence of Lambert Eaton Syndrome (LES) in a human based on immunological reactivity of LES immunoglobulin G (IgG) with a human calcium channel subunit or a eukaryotic cell which expresses a recombinant human calcium channel or a subunit thereof is also provided. In particular, an immunoassay method for diagnosing Lambert-Eaton Syndrome in a person by combining serum or an IgG fraction from the person (test serum) with calcium channel proteins, including the α and β subunits, and ascertaining whether antibodies in the test serum react with one or more of the subunits, or a recombinant cell which expresses one or more of the subunits to a greater extent than antibodies in control serum, obtained from a person or group of persons known to be free of the Syndrome, is provided. Any immunoassay procedure known in the art for detecting antibodies against a given antigen in serum can be employed in the method.

### DETAILED DESCRIPTION OF THE INVENTION

[0047] Definitions:

[0048] Unless defined otherwise, all technical and scientific terms used herein have the same meaning as is commonly understood by one of skill in the art to which this invention belongs. All patents and publications referred to herein are incorporated by reference herein.

[0049] Reference to each of the calcium channel subunits includes the subunits that are specifically disclosed herein and human calcium channel subunits encoded by DNA that can be isolated by using the DNA disclosed as probes and screening an appropriate human cDNA or genomic library under at least low stringency. Such DNA also includes DNA that encodes proteins that have about 40% homology to any of the subunits proteins described herein or DNA that hybridizes under conditions of at least low stringency to the DNA provided herein and the protein encoded by such DNA exhibits additional identifying characteristics, such as function or molecular weight.

[0050] It is understood that subunits that are encoded by transcripts that represent splice variants of the disclosed subunits or other such subunits may exhibit less than 40% overall homology to any single subunit, but will include regions of such homology to one or more such subunits. It is also understood that 40% homology refers to proteins that share approximately 40% of their amino acids in common or that share somewhat less, but include conservative amino acid substitutions, whereby the activity of the protein is not substantially altered.

[0051] The subunits and DNA fragments encoding such subunits provided herein include any α₁, α₂, β or γ subunits of a human calcium channel. In particular, such DNA fragments include any isolated DNA fragment that (encodes a subunit of a human calcium channel, that (1) contains a sequence of nucleotides that encodes the subunit, and (2) is selected from among:

[0052] (a) a sequence of nucleotides that encodes a human calcium channel subunit and includes a sequence of nucleotides set forth in any of the SEQ ID's herein (i.e., SEQ ID Nos. 1-38) that encodes such subunit;

[0053] (b) a sequence of nucleotides that encodes the subunit and hybridizes under conditions of high stringency to DNA that is complementary to an mRNA transcript present in a human cell that encodes a subunit that includes the sequence of nucleotides set forth in any of SEQ ID No. 1-38;

[0054] (c) a sequence of nucleotides that encodes the subunit that includes a sequence of amino acids encoded by any of SEQ ID Nos. 1-38; and

[0055] (d) a sequence of nucleotides that encodes a subunit that includes a sequence of amino acids encoded by a sequence of nucleotides that encodes such subunit and hybridizes under conditions of high stringency to DNA that is complementary to an mRNA transcript present in a human cell that encodes the subunit that includes the sequence of nucleotides set forth in any of SEQ ID Nos. 1-38.

[0056] As used herein, the a, subunits types, encoded by different genes, are designated as type α_{1A}, α_{1B}, α_{1C}, α_{1D} and α_{1E}. These types have also been referred to as VDCC IV for α_{1B}, VDCC II for α_{1C} and VDCC III for α_{1D}. Subunit subtypes, which are splice variants, are referred to, for example as α_{1B-1}, α_{1B-2}, α_{1C-1} etc.

[0057] Thus, as used herein, DNA encoding the α₁ subunit refers to DNA that hybridizes to the DNA provided herein under conditions of at least low stringency or encodes a subunit that has at least about 40% homology to protein encoded by DNA disclosed herein that encodes an α₁ subunit of a human calcium channel. In particular, a splice variant of any of the α₁ subunits (or any of the subunits particularly disclosed herein) will contain regions (at least one exon) of divergence and one or more regions (at least one exon, typically more than about 16 nucleotides, and generally substantially more) that have 100% homology with one or more of the α₁ subunit subtypes provided herein, and will also contain a region that has substantially less homology, since it is derived from a different exon. It is well within the skill of those in this art to identify exons and splice variants. Thus, for example, an α_{1A} subunit will be readily identifiable, because it will share at least about 40% protein homology with one of the α_{1A} subunits disclosed herein, and will include at least one region (one exon) that is 100% homologous. It will also have activity, as discussed below, that indicates that it is an α₁ subunit.

[0058] An α₁ subunit may be identified by its ability to form a calcium channel. Typically, α₁ subunits have molecular masses greater than at least about 120 kD. Also, hydropathy plots of deduced α₁ subunit amino acid sequences indicate that the α₁ subunits contain four internal repeats, each containing six putative transmembrane domains.

[0059] The activity of a calcium channel may be assessed in vitro by methods known to those of skill in the art, including the electrophysiological and other methods described herein. Typically, α₁ subunits include regions with which one or more modulators of calcium channel activity, such as a 1,4-DHP or ω-CgTx, interact directly or indirectly. Types of α₁ subunits may be distinguished by any method known to those of skill in the art, including on the basis of binding specificity. For example, it has been found herein that α_{1B} subunits participate in the formation of channels that have previously been referred to as N-type channels, α_{1D} subunits participate in the formation of channels that had previously been referred to as L-type channels, and α_{1A} subunits appear to participate in the formation of channels that exhibit characteristics typical of channels that had previously been designated P-type channels. Thus, for example, the activity of channels that contain the α_{1B} subunit are insensitive to 1,4-DHPs; whereas the activity of channels that contain the α_{1D} subunit are modulated or altered by a 1,4-DHP. It is presently preferable to refer to calcium channels based on pharmacological characteristics and current kinetics and to avoid historical designations. Types and subtypes of α₁ subunits may be characterized on the basis of the effects of such modulators on the subunit or a channel containing the subunit as well as differences in currents and current kinetics produced by calcium channels containing the subunit.

[0060] As used herein, an α₂ subunit is encoded by DNA that hybridizes to the DNA provided herein under conditions of low stringency or encodes a protein that has at least about 40% homology with that disclosed herein. Such DNA encodes a protein that typically has a molecular mass greater than about 120 kD, but does not form a calcium channel in the absence of an α₁ subunit, and may alter the activity of a calcium channel that contains an α₁ subunit. Subtypes of the α₂ subunit that arise as splice variants are designated by lower case letter, such as α₂ₐ, . . . α₂ₑ. In addition, the α₂ subunit and the large fragment produced when the protein is subjected to reducing conditions appear to be glycosylated with at least N-linked sugars and do not specifically bind to the 1,4-DHPs and phenylalkylamines that specifically bind to the α₁ subunit. The smaller fragment, the C-terminal fragment, is referred to as the δ subunit and includes amino acids from about 946 (SEQ ID No. 11) through about the C-terminus. This fragment may dissociate from the remaining portion of α₂ when the α₂ subunit is exposed to reducing conditions.

[0061] As used herein, a β subunit is encoded by DNA that hybridizes to the DNA provided herein under conditions of low stringency or encodes a protein that has at least about 40% homology with that disclosed herein and is a protein that typically has a molecular mass lower than the a subunits and on the order of about 50-80 kD, does not form a detectable calcium channel in the absence of an α₁ subunit, but may alter the activity of a calcium channel that contains an a subunit or that contains an α₁ and α₂ subunit.

[0062] Types of the β subunit that are encoded by different genes are designated with subscripts, such as β₁, β₂, β₃ and β₄. Subtypes of β subunits that arise as splice variants of a particular type are designated with a numerical subscript referring to the type and to the variant. Such subtypes include, but are not limited to the β₁ splice variants, including β₁₋₁-β₁₋₅ and β₂ variants, including β_{2C}-β_{2E}.

[0063] As used herein, a γ subunit is a subunit encoded by DNA disclosed herein as encoding the γ subunit and may be isolated and identified using the DNA disclosed herein as a probe by hybridization or other such method known to those of skill in the art, whereby full-length clones encoding a γ subunit may be isolated or constructed. A γ subunit will be encoded by DNA that hybridizes to the DNA provided herein under conditions of low stringency or exhibits sufficient sequence homology to encode a protein that has at least about 40% homology with the γ subunit described herein.

[0064] Thus, one of skill in the art, in light of the disclosure herein, can identify DNA encoding α₁, α₂, β, δ and γ calcium channel subunits, including types encoded by different genes and subtypes that represent splice variants. For example, DNA probes based on the DNA disclosed herein may be used to screen an appropriate library, including a genomic or cDNA library, for hybridization to the probe and obtain DNA in one or more clones that includes an open reading fragment that encodes an entire protein. Subsequent to screening an appropriate library with the DNA disclosed herein, the isolated DNA can be examined for the presence of an open reading frame from which the sequence of the encoded protein may be deduced. Determination of the molecular weight and comparison with the sequences herein should reveal the identity of the subunit as an α₁, α₂ etc. subunit. Functional assays may, if necessary, be used to determine whether the subunit is an α₁, α₂ subunit or β subunit.

[0065] For example, DNA encoding an α_{1A} subunit may be isolated by screening an appropriate library with DNA, encoding all or a portion of the human α_{1A} subunit. Such DNA includes the DNA in the phage deposited under ATCC Accession No. 75293 that encodes a portion of an α₁ subunit. DNA encoding an α_{1A} subunit may be obtained from an appropriate library by screening with an oligonucleotide having all or a portion of the sequence set forth in SEQ ID No. 21, 22 and/or 23 or with the DNA in the deposited phage. Alternatively, such DNA may have a sequence that encodes an α_{1A} subunit that is encoded by SEQ ID NO. 22 or 23.

[0066] Similarly, DNA encoding β₃ may be isolated by screening a human cDNA library with DNA probes prepared from the plasmid β1.42 deposited under ATCC Accession No. 69048 or may be obtained from an appropriate library using probes having sequences prepared according to the sequences set forth in SEQ ID Nos. 19 and/or 20. Also, DNA encoding β₄ may be isolated by screening a human cDNA library with DNA probes prepared according to DNA set forth in SEQ ID No. 27, which sets forth the DNA sequence of a clone encoding a β₄ subunit. The amino acid sequence is set forth in SEQ ID No. 28. Any method known to those of skill in the art for isolation and identification of DNA and preparation of full-length genomic or cDNA clones, including methods exemplified herein, may be used.

[0067] The subunit encoded by isolated DNA may be identified by comparison with the DNA and amino acid sequences of the subunits provided herein. Splice variants share extensive regions of homology, but include non-homologous regions, subunits encoded by different genes share a uniform distribution of non-homologous sequences.

[0068] As used herein, a splice variant refers to a variant produced by differential processing of a primary transcript of genomic DNA that results in more than one type of mRNA. Splice variants may occur within a single tissue type or among tissues (tissue-specific variants). Thus, cDNA clones that encode calcium channel subunit subtypes that have regions of identical amino acids and regions of different amino acid sequences are referred to herein as “splice variants”.

[0069] As used herein, a “calcium channel-selective ion” is an ion that is capable of flowing through, or being blocked from flowing through, a calcium channel which spans a cellular membrane under conditions which would substantially similarly permit or block the flow of Ca²⁺. Ba²⁺ is an example of an ion which is a calcium channel-selective ion.

[0070] As used herein, a compound that modulates calcium channel activity is one that affects the ability of the calcium channel to pass calcium channel-selective ions or affects other detectable calcium channel features, such as current kinetics. Such compounds include calcium channel antagonists and agonists and compounds that exert their effect on the activity of the calcium channel directly or indirectly.

[0071] As used herein, a “substantially pure” subunit or protein is a subunit or protein that is sufficiently free of other polypeptide contaminants to appear homogeneous by SDS-PAGE or to be unambiguously sequenced.

[0072] As used herein, selectively hybridize means that a DNA fragment hybridizes to a second fragment with sufficient specificity to permit the second fragment to be identified or isolated from among a plurality of fragments. In general, selective hybridization occurs at conditions of high stringency.

[0073] As used herein, heterologous or foreign DNA and RNA are used interchangeably and refer to DNA or RNA that does not occur naturally as part of the genome in which it is present or which is found in a location or locations in the genome that differ from that in which it occurs in nature. It is DNA or RNA that is not endogenous to the cell and has been artificially introduced into the cell. Examples of heterologous DNA include, but are not limited to, DNA that encodes a calcium channel subunit and DNA that encodes RNA or proteins that mediate or alter expression of endogenous DNA by affecting transcription, translation, or other regulatable biochemical processes. The cell that expresses the heterologous DNA, such as DNA encoding a calcium channel subunit, may contain DNA encoding the same or different calcium channel subunits. The heterologous DNA need not be expressed and may be introduced in a manner such that it is integrated into the host cell genome or is maintained episomally.

[0074] As used herein, operative linkage of heterologous DNA to regulatory and effector sequences of nucleotides, such as promoters, enhancers, transcriptional and translational stop sites, and other signal sequences, refers to the functional relationship between such DNA and such sequences of nucleotides. For example, operative linkage of heterologous DNA to a promoter refers to the physical and functional relationship between the DNA and the promoter such that the transcription of such DNA is initiated from the promoter by an RNA polymerase that specifically recognizes, binds to and transcribes the DNA in reading frame.

[0075] As used herein, isolated, substantially pure DNA refers to DNA fragments purified according to standard techniques employed by those skilled in the art [see, e.g., Maniatis. et al. (1982) Molecular Cloning: A Laboratory Manual, Cold Spring Harbor Laboratory Press, Cold Spring Harbor, N.Y.].

[0076] As used herein, expression refers to the process by which nucleic acid is transcribed into mRNA and translated into peptides, polypeptides, or proteins. If the nucleic acid is derived from genomic DNA, expression may, if an appropriate eukaryotic host cell or organism is selected, include splicing of the mRNA.

[0077] As used herein, vector or plasmid refers to discrete elements that are used to introduce heterologous DNA into cells for either expression of the heterologous DNA or for replication of the cloned heterologous DNA. Selection and use of such vectors and plasmids are well within the level of skill of the art.

[0078] As used herein, expression vector includes vectors capable of expressing DNA fragments that are in operative linkage with regulatory sequences, such as promoter regions, that are capable of effecting expression of such DNA fragments. Thus, an expression vector refers to a recombinant DNA or RNA construct, such as a plasmid, a phage, recombinant virus or other vector that, upon introduction into an appropriate host cell, results in expression of the cloned DNA. Appropriate expression vectors are well known to those of skill in the art and include those that are replicable in eukaryotic cells and/or prokaryotic cells and those that remain episomal or may integrate into the host cell genome.

[0079] As used herein, a promoter region refers to the portion of DNA of a gene that controls transcription of the DNA to which it is operatively linked. The promoter region includes specific sequences of DNA that are sufficient for RNA polymerase recognition, binding and transcription initiation. This portion of the promoter region is referred to as the promoter. In addition, the promoter region includes sequences that modulate this recognition, binding and transcription initiation activity of the RNA polymerase. These sequences may be cis acting or may be responsive to trans acting factors. Promoters, depending upon the nature of the regulation, may be constitutive or regulated.

[0080] As used herein, a recombinant eukaryotic cell is a eukaryotic cell that contains heterologous DNA or RNA.

[0081] As used herein, a recombinant or heterologous calcium channel refers to a calcium channel that contains one or more subunits that are encoded by heterologous DNA that has been introduced into and expressed in a eukaryotic cell that expresses the recombinant calcium channel. A recombinant calcium channel may also include subunits that are produced by DNA endogenous to the cell. In certain embodiments, the recombinant or heterologous calcium channel may contain only subunits that are encoded by heterologous DNA.

[0082] As used herein, “functional” with respect to a recombinant or heterologous calcium channel means that the channel is able to provide for and regulate entry of calcium channel-selective ions, including, but not limited to, Ca²⁺ or Ba²⁺, in response to a stimulus and/or bind ligands with affinity for the channel. Preferably such calcium channel activity is distinguishable, such as by electro-physiological, pharmacological and other means known to those of skill in the art, from any endogenous calcium channel activity that is in the host cell.

[0083] As used herein, a peptide having an amino acid sequence substantially as set forth in a particular SEQ ID No. includes peptides that have the same function but may include minor variations in sequence, such as conservative amino acid changes or minor deletions or insertions that do not alter the activity of the peptide. The activity of a calcium channel receptor subunit peptide refers to its ability to form functional calcium channels with other such subunits.

[0084] As used herein, a physiological concentration of a compound is that which is necessary and sufficient for a biological process to occur. For example, a physiological concentration of a calcium channel-selective ion is a concentration of the calcium channel-selective ion necessary and sufficient to provide an inward current when the channels open.

[0085] As used herein, activity of a calcium channel refers to the movement of a calcium channel-selective ion through a calcium channel. Such activity may be measured by any method known to those of skill in the art, including, but not limited to, measurement of the amount of current which flows through the recombinant channel in response to a stimulus.

[0086] As used herein, a “functional assay” refers to an assay that identifies functional calcium channels. A functional assay, thus, is an assay to assess function.

[0087] As understood by those skilled in the art, assay methods for identifying compounds, such as antagonists and agonists, that modulate calcium channel activity, generally require comparison to a control. One type of a “control” cell or “control” culture is a cell or culture that is treated substantially the same as the cell or culture exposed to the test compound except that the control culture is not exposed to the test compound. Another type of a “control” cell or “control” culture may be a cell or a culture of cells which are identical to the transfected cells except the cells employed for the control culture do not express functional calcium channels. In this situation, the response of test cell to the test compound is compared to the response (or lack of response) of the calcium channel-negative cell to the test compound, when cells or cultures of each type of cell are exposed to substantially the same reaction conditions in the presence of the compound being assayed. For example, in methods that use patch clamp electrophysiological procedures, the same cell can be tested in the presence and absence of the test compound, by changing the external solution bathing the cell as known in the art.

[0088] It is also understood that each of the subunits disclosed herein may be modified by making conservative amino acid substitutions and the resulting modified subunits are contemplated herein. Suitable conservative substitutions of amino acids are known to those of skill in this art and may be made generally without altering the biological activity of the resulting molecule. Those of skill in this art recognize that, in general, single amino acid substitutions in non-essential regions of a polypeptide do not substantially alter biological activity (see, e.g., Watson et al. Molecular Biology of the Gene, 4th Edition, 1987, The Benjamin/Cummings Pub. Co., p.224). Such substitutions are preferably, although not exclusively, made in accordance with those set forth in TABLE 1 as follows:

TABLE 1

| Original residue | Conservative substitution |
|---|---|
| Ala (A) | Gly; Ser |
| Arg (R) | Lys |
| Asn (N) | Gln; His |
| Cys (C) | Ser |
| Gln (Q) | Asn |
| Glu (E) | Asp |
| Gly (G) | Ala; Pro |
| His (H) | Asn; Gln |
| Ile (I) | Leu: Val |
| Leu (L) | Ile; Val |
| Lys (K) | Arg; Gln; Glu |
| Met (M) | Leu; Tyr; Ile |
| Phe (F) | Met; Leu; Tyr |
| Ser (S) | Thr |
| Thr (T) | Ser |
| Trp (W) | Tyr |
| Tyr (Y) | Trp; Phe |
| Val (V) | Ile; Leu |

[0089] Other substitutions are also permissible and may be determined empirically or in accord with known conservative substitutions. Any such modification of the polypeptide may be effected by any means known to those of skill in this art. Mutation may be effected by any method known to those of skill in the art, including site-specific or site-directed mutagenesis of DNA encoding the protein and the use of DNA amplification methods using primers to introduce and amplify alterations in the DNA template.

[0090] Identification and Isolation of DNA Encoding Human Calcium Channel Subunits

[0091] Methods for identifying and isolating DNA encoding α₁, α₂, β and γ subunits of human calcium channels are provided.

[0092] Identification and isolation of such DNA may be accomplished by hybridizing, under appropriate conditions, at least low stringency whereby DNA that encodes the desired subunit is isolated, restriction enzyme-digested human DNA with a labeled probe having at least 14, preferably 16 or more nucleotides and derived from any contiguous portion of DNA having a sequence of nucleotides set forth herein by sequence identification number. Once a hybridizing fragment is identified in the hybridization reaction, it can be cloned employing standard cloning techniques known to those of skill in the art. Full-length clones may be identified by the presence of a complete open reading frame and the identity of the encoded protein verified by sequence comparison with the subunits provided herein and by functional assays to assess calcium channel-forming ability or other function. This method can be used to identify genomic DNA encoding the subunit or cDNA encoding splice variants of human calcium channel subunits generated by alternative splicing of the primary transcript of genomic subunit DNA. For instance, DNA, cDNA or genomic DNA, encoding a calcium channel subunit may be identified by hybridization to a DNA probe and characterized by methods known to those of skill in the art, such as restriction mapping and DNA sequencing, and compared to the DNA provided herein in order to identify heterogeneity or divergence in the sequences of the DNA. Such sequence differences may indicate that the transcripts from which the cDNA was produced result from alternative splicing of a primary transcript, if the non-homologous and homologous regions are clustered, or from a different gene if the non-homologous regions are distributed throughout the cloned DNA. Splice variants share regions of 100% homology.

[0093] Any suitable method for isolating genes using the DNA provided herein may be used. For example, oligonucleotides corresponding to regions of sequence differences have been used to isolate, by hybridization, DNA encoding the full-length splice variant and can be used to isolate genomic clones. A probe, based on a nucleotide sequence disclosed herein, which encodes at least a portion of a subunit of a human calcium channel, such as a tissue-specific exon, may be used as a probe to clone related DNA, to clone a full-length cDNA clone or genomic clone encoding the human calcium channel subunit.

[0094] Labeled, including, but not limited to, radioactively or enzymatically labeled, RNA or single-stranded DNA of at least 14 substantially contiguous bases, preferably 16 or more, generally at least 30 contiguous bases of a nucleic acid which encodes at least a portion of a human calcium channel subunit, the sequence of which nucleic acid corresponds to a segment of a nucleic acid sequence disclosed herein by reference to a SEQ ID No. are provided. Such nucleic acid segments may be used as probes in the methods provided herein for cloning DNA encoding calcium channel subunits. See, generally, Sambrook et al. (1989) Molecular Cloning: A Laboratory Manual, 2nd Edition, Cold Spring Harbor Laboratory Press.

[0095] In addition, nucleic acid amplification techniques, which are well known in the art, can be used to locate splice variants of calcium channel subunits by employing oligonucleotides based on DNA sequences surrounding the divergent sequence primers for amplifying human RNA or genomic DNA. Size and sequence determinations of the amplification products can reveal splice variants. Furthermore, isolation of human genomic DNA sequences by hybridization can yield DNA containing multiple exons, separated by introns, that correspond to different splice variants of transcripts encoding human calcium channel subunits.

[0096] DNA encoding types and subtypes of each of the α₁, α₂, β and γ subunits of voltage-dependent human calcium channels has been cloned herein by nucleic acid amplication of cDNA from selected tissues or by screening human cDNA libraries prepared from isolated poly A+ mRNA from cell lines or tissue of human origin having such calcium channels. Among the sources of such cells or tissue for obtaining mRNA are human brain tissue or a human cell line of neural origin, such as a neuroblastoma cell line, human skeletal muscle or smooth muscle cells, and the like. Methods of preparing cDNA libraries are well known in the art [see generally Ausubel et al. (1987) Current Protocols in Molecular Biology, Wiley-Interscience, New York; and Davis et al. (1986) Basic Methods in Molecular Biology, Elsevier Science Publishing Co., New York].

[0097] Preferred regions from which to construct probes include 5′ and/or 3′ coding sequences, sequences predicted to encode transmembrane domains, sequences predicted to encode cytoplasmic loops, signal sequences, ligand-binding sites, and other functionally significant sequences (see Table, below). Either the full-length subunit-encoding DNA or fragments thereof can be used as probes, preferably labeled with suitable label means for ready detection. When fragments are used as probes, preferably the DNA sequences will be typically from the carboxyl-end-encoding portion of the DNA, and most preferably will include predicted transmembrane domain-encoding portions based on hydropathy analysis of the deduced amino acid sequence [see, e.g., Kyte and Doolittle [(1982) J. Mol. Biol. 167:105].

[0098] Riboprobes that are specific for human calcium channel subunit types or subtypes have been prepared. These probes are useful for identifying expression of particular subunits in selected tissues and cells. The regions from which the probes were prepared were identified by comparing the DNA and amino acid sequences of all known α or β subunit subtypes. Regions of least homology, preferably human-derived sequences, and generally about 250 to about 600 nucleotides were selected. Numerous riboprobes for α and β subunits have been prepared; some of these are listed in the following Table.

TABLE 2
SUMMARY OF RNA PROBES

| SUBUNIT | NUCLEOTIDE | | | ORIENTA- |
|---|---|---|---|---|
| SPECIFICITY | POSITION | PROBE NAME | PROBE TYPE | TION |
| α1A generic | 3357-3840 | pGEM7Zα1A* | riboprobe | n/a |
| | 761-790 | SE700 | oligo | antisense |
| | 3440-3464 | SE718 | oligo | antisense |
| | 3542-3565 | SE724 | oligo | sense |
| α1B generic | 3091-3463 | pGEM7Zα1B_{cyt} | riboprobe | n/a |
| | 6635-6858 | pGEM7Zα1B_{cooh} | riboprobe | n/a |
| α1B-1 | 6490-6676 | pCRII | riboprobe | n/a |
| specific | | α1B-1/187 | | |
| α1E generic | 3114-3462 | pGEM7Zα1E | riboprobe | n/a |
| α2b | 1321-1603 | pCRIIα2b | riboprobe | n/a |
| β generic (?) | 212-236 | SE300 | oligo | antisense |
| β1 generic | 1267-1291 | SE301 | oligo | antisense |
| β-2 | 1333-1362 | SE17 | oligo | antisense |
| specific | | | | |
| | 1682-1706 | SE23 | oligo | sense |
| | 2742-2766 | SE43 | oligo | antisense |
| | 27-56 | SE208 | oligo | antisense |
| | 340-364 | SE274 | oligo | antisense |
| | 340-364 | SE275 | oligo | sense |
| β3 specific | 1309-1509 | | riboprobe | n/a |
| β4 specific | 1228-1560 | | riboprobe | n/a |

*The pGEM series are available from Promega, Madison WI; see also, U.S. Pat. No. 4,766,072.

[0099] The above-noted nucleotide regions are also useful in selecting regions of the protein for preparation of subunit-specific antibodies, discussed below.

[0100] The DNA clones and fragments thereof provided herein thus can be used to isolate genomic clones encoding each subunit and to isolate any splice variants by hybridization screening of libraries prepared from different human tissues. Nucleic acid amplification techniques, which are well known in the art, can also be used to locate DNA encoding splice variants of human calcium channel subunits. This is accomplished by employing oligonucleotides based on DNA sequences surrounding divergent sequence(s) as primers for amplifying human RNA or genomic DNA. Size and sequence determinations of the amplification products can reveal the existence of splice variants. Furthermore, isolation of human genomic DNA sequences by hybridization can yield DNA containing multiple exons, separated by introns, that correspond to different splice variants of transcripts encoding human calcium channel subunits.

[0101] Once DNA encoding a calcium channel subunit is isolated, ribonuclease (RNase) protection assays can be employed to determine which tissues express mRNA encoding a particular calcium channel subunit or variant. These assays provide a sensitive means for detecting and quantitating an RNA species in a complex mixture of total cellular RNA. The subunit DNA is labeled and hybridized with cellular RNA. If complementary mRNA is present in the cellular RNA, a DNA-RNA hybrid results. The RNA sample is then treated with RNase, which degrades single-stranded RNA. Any RNA-DNA hybrids are protected from RNase degradation and can be visualized by gel electrophoresis and autoradiography. In situ hybridization techniques can also be used to determine which tissues express mRNA encoding a particular calcium channel subunit. The labeled subunit DNAs are hybridized to different tissue slices to visualize subunit mRNA expression.

[0102] With respect to each of the respective subunits (α₁, α₂, β or γ) of human calcium channels, once the DNA encoding the channel subunit was identified by a nucleic acid screening method, the isolated clone was used for further screening to identify overlapping clones. Some of the cloned DNA fragments can and have been subcloned into an appropriate vector such as pIBI24/25 (IBI, New Haven, Conn.), M13mp18/19, pGEM4, pGEM3, pGEM7Z, pSP72 and other such vectors known to those of skill in this art, and characterized by DNA sequencing and restriction enzyme mapping. A sequential series of overlapping clones may thus be generated for each of the subunits until a full-length clone can be prepared by methods, known to those of skill in the art, that include identification of translation initiation (start) and translation termination (stop) codons. For expression of the cloned DNA, the 5′ noncoding region and other transcriptional and translational control regions of such a clone may be replaced with an efficient ribosome binding site and other regulatory regions as known in the art. Other modifications of the 5′ end, known to those of skill in the art, that may be required to optimize translation and/or transcription efficiency may also be effected, if deemed necessary.

[0103] Examples II-VIII, below, describe in detail the cloning of each of the various subunits of a human calcium channel as well as subtypes and splice variants, including tissue-specific variants thereof. In the few instances in which partial sequences of a subunit are disclosed, it is well within the skill of the art, in view of the teaching herein, to obtain the corresponding full-length clones and sequence thereof encoding the subunit, subtype or splice variant thereof using the methods described above and exemplified below.

[0104] Identification and Isolation of DNA Encoding α₁ Subunits

[0105] A number of voltage-dependent calcium channel α₁ subunit genes, which are expressed in the human CNS and in other tissues, have been identified and have been designated as α_{1A}, α_{1B} (or VDCC IV), α_{1C} (or VDCC II), α_{1D} (or VDCC III) and α_{1E}. DNA, isolated from a human neural cDNA library, that encodes each of the subunit types has been isolated. DNA encoding subtypes of each of the types, which arise as splice variants are also provided. Subtypes are herein designated, for example, as α_{1B-1}, α_{1B-2}.

[0106] The α₁ subunit types A, B, C, D and E of voltage-dependent calcium channels, and subtypes thereof, differ with respect to sensitivity to known classes of calcium channel agonists and antagonists, such as DHPs, phenylalkylamines, omega conotoxin (ω-CgTx), the funnel web spider toxin ω-Aga-IV, and pyrazonoylguanidines. These subunit types also appear to differ in the holding potential and in the kinetics of currents produced upon depolarization of cell membranes containing calcium channels that include different types of α₁ subunits.

[0107] DNA that encodes an α₁ subunit that binds to at least one compound selected from among dihydropyridines, phenylalkylamines, ω-CgTx, components of funnel web spider toxin, and pyrazonoylguanidines is provided. For example, the α₁ subunit provided herein appears to specifically interact with ω-CgTx in N-type channels, and the α_{1D} subunit provided herein specifically interacts with DHPs in L-type channels.

[0108] Identification and Isolation of DNA Encoding the α_{1D} Human Calcium Channel Subunit

[0109] The α_{1D} subunit cDNA has been isolated using fragments of the rabbit skeletal muscle calcium channel α₁ subunit cDNA as a probe to screen a cDNA library of a human neuroblastoma cell line, IMR32, to obtain clone α1.36. This clone was used as a probe to screen additional IMR32 cell cDNA libraries to obtain overlapping clones, which were then employed for screening until a sufficient series of clones to span the length of the nucleotide sequence encoding the human α_{1D} subunit was obtained. Full-length clones encoding α_{1D} were constructed by ligating portions of partial α_{1D} clones as described in Example II. SEQ ID No. 1 shows the 7,635 nucleotide sequence of the cDNA encoding the α_{1D} subunit. There is a 6,483 nucleotide sequence reading frame which encodes a sequence of 2,161 amino acids (as set forth in SEQ ID No. 1).

[0110] SEQ ID No. 2 provides the sequence of an alternative exon encoding the IS6 transmembrane domain [see Tanabe, T., et al. (1987) Nature 328:313-318 for a description of transmembrane domain terminology] of the α_{1D} subunit.

[0111] SEQ ID No. 1 also shows the 2,161 amino acid sequence deduced from the human neuronal calcium channel α_{1D} subunit DNA. Based on the amino acid sequence, the α_{1D} protein has a calculated Mr of 245,163. The α_{1D} subunit of the calcium channel contains four putative internal repeated sequence regions. Four internally repeated regions represent 24 putative transmembrane segments, and the amino- and carboxyl-termini extend intracellularly.

[0112] The α_{1D} subunit has been shown to mediate DHP-sensitive, high-voltage-activated, long-lasting calcium channel activity. This calcium channel activity was detected when oöcytes were co-injected with RNA transcripts encoding an α_{1D} and β₁₋₂ or α_{1D}, α_{2b} and β₁₋₂ subunits. This activity was distinguished from Ba²⁺ currents detected when oöcytes were injected with RNA transcripts encoding the β₁₋₂±α_{2b} subunits. These currents pharmacologically and biophysically resembled Ca²⁺ currents reported for uninjected oöcytes.

[0113] Identification and Isolation of DNA Encoding the α_{1A} Human Calcium Channel Subunit

[0114] Biological material containing DNA encoding a portion of the α_{1A} subunit had been deposited in the American Type Culture Collection, 12301 Parklawn Drive, Rockville, Md. 20852 U.S.A. under the terms of the Budapest Treaty on the International Recognition of Deposits of Microorganisms for Purposes of Patent Procedure and the Regulations promulgated under this Treaty. Samples of the deposited material are and will be available to industrial property offices and other persons legally entitled to receive them under the terms of the Treaty and Regulations and otherwise in compliance with the patent laws and regulations of the United States of America and all other nations or international organizations in which this application, or an application claiming priority of this application, is filed or in which any patent granted on any such application is granted.

[0115] A portion of an α_{1A} subunit is encoded by an approximately 3 kb insert in λgt10 phage designated α1.254 in E. coli host strain NM514. A phage lysate of this material has been deposited as at the American Type Culture Collection under ATCC Accession No. 75293, as described above. DNA encoding a may also be identified by screening with a probe prepared from DNA that has SEQ ID No. 21:

[0116] 5′ CTCAGTACCATCTCTGATACCAGCCCCA 3′.

[0117] α_{1A} splice variants have been obtained. The sequences of two α_{1A} splice variants, α₁ₐ₋₁ and α₁ₐ₋₂ are set forth in SEQ. ID Nos. 22 and 23. Other splice variants may be obtained by screening a human library as described above or using all or a portion of the sequences set forth in SEQ ID Nos. 22 and 23.

[0118] Identification and Isolation of DNA Encoding the α_{1B} Human Calcium Channel Subunit

[0119] DNA encoding the α_{1B} subunit was isolated by screening a human basal ganglia cDNA library with fragments of the rabbit skeletal muscle calcium channel α₁ subunit-encoding cDNA. A portion of one of the positive clones was used to screen an IMR32 cell cDNA library. Clones that hybridized to the basal ganglia DNA probe were used to further screen an IMR32 cell cDNA library to identify overlapping clones that in turn were used to screen a human hippocampus cDNA library. In this way, a sufficient series of clones to span nearly the entire length of the nucleotide sequence encoding the human α_{1B} subunit was obtained. Nucleic acid amplification of specific regions of the IMR32 cell α_{1B} mRNA yielded additional segments of the α_{1B} coding sequence.

[0120] A full-length α_{1B} DNA clone was constructed by ligating portions of the partial cDNA clones as described in Example II.C. SEQ ID Nos. 7 and 8 show the nucleotide sequences of DNA clones encoding the α_{1B} subunit as well as the deduced amino acid sequences. The α_{1B} subunit encoded by SEQ ID No. 7 is referred to as the α_{1B-1} subunit to distinguish it from another α_{1B} subunit, α_{1B-2} encoded by the nucleotide sequence shown as SEQ ID No. 8, which is derived from alternative splicing of the α_{1B} subunit transcript.

[0121] Nucleic acid amplification of IMR32 cell mRNA using oligonucleotide primers designed according to nucleotide sequences within the α_{1B-1}-encoding DNA has identified variants of the α_{1B} transcript that appear to be splice variants because they contain divergent coding sequences.

[0122] Identification and Isolation of DNA Encoding the α_{1C} Human Calcium Channel Subunit

[0123] Numerous α_{1C}-specific DNA clones were isolated. Characterization of the sequence revealed the α_{1C} coding sequence, the α_{1C} initiation of translation sequence, and an alternatively spliced region of α_{1C}. Alternatively spliced variants of the α_{1C} subunit have been identified. SEQ ID No. 3 sets forth DNA encoding a substantial portion of an α_{1C} subunit. The DNA sequences set forth in SEQ ID No. 4 and No. 5 encode two possible amino terminal ends of the α_{1C} protein. SEQ ID No. 6 encodes an alternative exon for the IV S3 transmembrane domain. The sequences of substantial portions of two α_{1C} splice variants, designated α_{1C-1} and α_{1C-2}, are set forth in SEQ ID NOs. 3 and 36, respectively.

[0124] The isolation and identification of DNA clones encoding portions of the α_{1C} subunit is described in detail in Example II.

[0125] Identification and Isolation of DNA Encoding the α_{1E} Human Calcium Channel Subunit

[0126] DNA encoding α_{1E} human calcium channel subunits have been isolated from an oligo dT-primed human hippocampus library. The resulting clones, which are splice variants, were designated α_{1E-1} and α_{1E-3}. The subunit designated α_{1E-1} has the amino acid sequence set forth in SEQ ID No. 24, and a subunit designated α_{1E-3} has the amino acid sequence set forth in SEQ ID No. 25. These splice variants differ by virtue of a 57 base pair insert between nucleotides 2405 and 2406 of SEQ. ID No. 24.

[0127] The α_{1E} subunits provided herein appear to participate in the formation of calcium channels that have properties of high-voltage activated calcium channels and low-voltage activated channels. These channels are rapidly inactivating compared to other high voltage-activated calcium channels. In addition these channels exhibit pharmacological profiles that are similar to voltage-activated channels, but are also sensitive to DHPs and ω-Aga-IVA, which block certain high voltage activated channels. Additional details regarding the electrophysiology and pharmacology of channels containing α_{1E} subunits is provided in Example VII. F.

[0128] Identification and Isolation of DNA Encoding Encoding Additional α₁ Human Calcium Channel Subunit Types and Subtypes

[0129] DNA encoding additional α₁ subunits can be isolated and identified using the DNA provided herein as described for the α_{1A}, α_{1B}, α_{1C}, α_{1D} and α_{1E} subunits or using other methods known to those of skill in the art. In particular, the DNA provided herein may be used to screen appropriate libraries to isolate related DNA. Full-length clones can be constructed using methods, such as those described herein, and the resulting subunits characterized by comparison of their sequences and electrophysiological and pharmacological properties with the subunits exemplified herein.

[0130] Identification and Isolation of DNA Encoding β Human Calcium Channel Subunits

[0131] DNA Encoding β₁

[0132] To isolate DNA encoding the β₁ subunit, a human hippocampus cDNA library was screened by hybridization to a DNA fragment encoding a rabbit skeletal muscle calcium channel β subunit. A hybridizing clone was selected and was in turn used to isolate overlapping clones until the overlapping clones encompassing DNA encoding the entire human calcium channel β subunit were isolated and sequenced.

[0133] Five alternatively spliced forms of the human calcium channel β₁ subunit have been identified and DNA encoding a number of forms have been isolated. These forms are designated β₁₋₁, expressed in skeletal muscle, β₁₋₂, expressed in the CNS, β₁₋₃, also expressed in the in the CNS, β₁₋₄, expressed in aorta tissue and HEK 293 cells, and β₁₋₅, expressed in HEK 293 cells. Full-length DNA clones encoding the β₁₋₂ and β₁₋₃ subunits have been constructed. The subunits β₁₋₁, β₁₋₂, β₁₋₄ and β₁₋₅ have been identified by nucleic acid amplification analysis as alternatively spliced forms of the β subunit. Sequences of the β₁ splice variants are set forth in SEQ ID Nos. 9, 10 and 33-35.

[0134] DNA Encoding β₂

[0135] DNA encoding the β₂ splice variants has been obtained. These splice variants include β_{2C}-β_{2E}. Splice variants β_{2C}-β_{2E} include all of sequence set forth in SEQ ID No. 26, except for the portion at the 5′ end (up to nucleotide 182), which differs among splice variants. The sequence set forth in SEQ ID No. 26 encodes β_{2D}. Additional splice variants may be isolated using the methods described herein and oligonucleotides including all or portions of the DNA set forth in SEQ ID. No. 26 or may be prepared or obtained as described in the Examples. The sequences of β₂ splice variants β_{2C} and β_{2E} are set forth in SEQ ID Nos. 37 and 38, respectively.

[0136] DNA Encoding β₃

[0137] DNA encoding the β₃ subunit and any splice variants thereof may be isolated by screening a library, as described above for the β₁ subunit, using DNA probes prepared according to SEQ ID Nos. 19, 20 or using all or a portion of the deposited β₃ clone plasmid β1.42 (ATCC Accession No. 69048).

[0138] The E. coli host containing plasmid β1.42 that includes DNA encoding a β₃ subunit has been deposited as ATCC Accession No. 69048 in the American Type Culture Collection, 12301 Parklawn Drive, Rockville, Md. 20852 U.S.A. under the terms of the Budapest Treaty on the International Recognition of Deposits of Microorganisms for Purposes of Patent Procedure and the Regulations promulgated under this Treaty. Samples of the deposited material are and will be available to industrial property offices and other persons legally entitled to receive them under the terms of the Treaty and Regulations and otherwise in compliance with the patent laws and regulations of the United States of America and all other nations or international organizations in which this application, or an application claiming priority of this application, is filed or in which any patent granted on any such application is granted.

[0139] The β₃ encoding plasmid is designated β1.42. The plasmid contains a 2.5 kb EcoRI fragment encoding β₃ inserted into vector pGem®7zF (+) and has been deposited in E. coli host strain DH5α. The sequences of β₃ splice variants, designated β₃₋₁ and β₃₋₂ are set forth in SEQ ID Nos. 19 and 20, respectively.

[0140] Identification and Isolation of DNA Encoding the α2 Human Calcium Channel Subunit

[0141] DNA encoding a human neuronal calcium channel α₂ subunit was isolated in a manner substantially similar to that used for isolating DNA encoding an α₁ subunit, except that a human genomic DNA library was probed under low and high stringency conditions with a fragment of DNA encoding the rabbit skeletal muscle calcium channel a subunit. The fragment included nucleotides having a sequence corresponding to the nucleotide sequence between nucleotides 43 and 272 inclusive of rabbit back skeletal muscle calcium channel α₂ subunit cDNA as disclosed in PCT International Patent Application Publication No. WO 89/09834, which corresponds to U.S. application Ser. No. 07/620,520 (now allowed U.S. application Ser. No. 07/914,231), which is a continuation-in-part of U.S. Ser. No. 176,899, filed Apr. 4, 1988, which applications have been incorporated herein by reference.

[0142] Example IV describes the isolation of DNA clones encoding α₂ subunits of a human calcium channel from a human DNA library using genomic DNA and cDNA clones, identified by hybridization to the genomic DNA, as probes.

[0143] SEQ ID Nos. 11 and 29-32 show the sequence of DNA encoding α₂ subunits. As described in Example V, nucleic acid amplification analysis of RNA from human skeletal muscle, brain tissue and aorta using oligonucleotide primers specific for a region of the human neuronal α₂ subunit cDNA that diverges from the rabbit skeletal muscle calcium channel α₂ subunit cDNA identified splice variants of the human calcium channel α₂ subunit transcript.

[0144] Identification and Isolation of DNA Encoding γ Human Calcium Channel Subunits

[0145] DNA encoding a portion of a human neuronal calcium channel γ subunit has been isolated as described in detail in Example VI. SEQ ID No. 14 shows the nucleotide sequence at the 3′-end of this DNA which includes a reading frame encoding a sequence of 43 amino acid residues. Since the portion that has been obtained is homologous to the rabbit clone, described in allowed co-owned U.S. application Ser. No. 07/482,384, the remainder of the clone can be obtained using routine methods.

[0146] Antibodies

[0147] Antibodies, monoclonal or polyclonal, specific for calcium channel subunit subtypes or for calcium channel types can be prepared employing standard techniques, known to those of skill in the art, using the subunit proteins or portions thereof as antigens. Anti-peptide and anti-fusion protein antibodies can be used [see, for example, Bahouth et al. (1991) Trends Pharmacol. Sci. 12:338-343; Current Protocols in Molecular Biology (Ausubel et al., eds.) John Wiley and Sons, New York (1984)]. Factors to consider in selecting portions of the calcium channel subunits for use as immunogens (as either a synthetic peptide or a recombinantly produced bacterial fusion protein) include antigenicity accessibility (i.e., extracellular and cytoplasmic domains), uniqueness to the particular subunit, and other factors known to those of skill in this art.

[0148] The availability of subunit-specific antibodies makes possible the application of the technique of immunohistochemistry to monitor the distribution and expression density of various subunits (e.g., in normal vs diseased brain tissue). Such antibodies could also be employed in diagnostic, such as LES diagnosis, and therapeutic applications, such as using antibodies that modulate activities of calcium channels.

[0149] The antibodies can be administered to a subject employing standard methods, such as, for example, by intraperitoneal, intramuscular, intravenous, or subcutaneous injection, implant or transdermal modes of administration. One of skill in the art can empirically determine dosage forms, treatment regiments, and other parameters, depending on the mode of administration employed.

[0150] Subunit-specific monoclonal antibodies and polyclonal antisera have been prepared. The regions from which the antigens were derived were identified by comparing the DNA and amino acid sequences of all known α or β subunit subtypes. Regions of least homology, preferably human-derived sequences were selected. The selected regions or fusion proteins containing the selected regions are used as immunogens. Hydrophobicity analyses of residues in selected protein regions and fusion proteins are also performed; regions of high hydrophobicity are avoided. Also, and more importantly, when preparing fusion proteins in bacterial hosts, rare codons are avoided. In particular, inclusion of 3 or more successive rare codons in a selected host is avoided. Numerous antibodies, polyclonal and monoclonal, specific for α or β subunit types or sub-types have been prepared; some of these are listed in the following Table. Exemplary antibodies and peptide antigens used to prepare the antibodies are set forth Table 3:

TABLE 3

| | AMINO ACID | ANTIGEN | |
|---|---|---|---|
| SPECIFICITY | NUMBER | NAME | ANTIBODY TYPE |
| α1 generic | 112-140 | peptide 1A #1 | polyclonal |
| α1 generic | 1420-1447 | peptide 1A #2 | polyclonal |
| α1A generic | 1048-1208 | α1A #2 (b) GST | polyclonal |
| | | fusion* | monoclonal |
| α1B generic | 983-1106 | α1B #2 (b) GST | polyclonal |
| | | fusion | monoclonal |
| α1B-1 | 2164-2339 | α1B-1 #3 GST | polyclonal |
| | | fusion | |
| α1B-2 | 2164-2237 | α1B-2 #4 GST | polyclonal |
| | | fusion | |
| α1E generic | 985-1004 | α1E #2 (a) GST | polyclonal |
| | (α1E-3) | fusion | |

*GST gene fusion system is available from Pharmacia; see also, Smith et al. (1988) Gene 67:31. The system provides pGEX plasmids that are designed for inducible, high-level expression of genes or gene fragments as fusions with Schistosorna japonicum GST. Upon expression in a bacterial host, the resulting fusion proteins are purified from bacterial lysates by affinity chromatography.

[0151] The GST fusion proteins are each specific for the cytoplasmic loop region IIS6-IIS1, which is a region of low subtype homology for all subtypes, including α_{1C} and α_{1D}, for which similar fusions and antisera can be prepared.

[0152] Preparation of Recombinant Eukaryotic Cells Containing DNA Encoding Heterologous Calcium Channel Subunits

[0153] DNA encoding one or more of the calcium channel subunits or a portion of a calcium channel subunit may be introduced into a host cell for expression or replication of the DNA. Such DNA may be introduced using methods described in the following examples or using other procedures well known to those skilled in the art. Incorporation of cloned DNA into a suitable expression vector, transfection of eukaryotic cells with a plasmid vector or a combination of plasmid vectors, each encoding one or more distinct genes or with linear DNA, and selection of transfected cells are also well known in the art [see, e.g., Sambrook et al. (1989) Molecular Cloning: A Laboratory Manual, Second Edition, Cold Spring Harbor Laboratory Press].

[0154] Cloned full-length DNA encoding any of the subunits of a human calcium channel may be introduced into a plasmid vector for expression in a eukaryotic cell. Such DNA may be genomic DNA or cDNA. Host cells may be transfected with one or a combination of the plasmids, each of which encodes at least one calcium channel subunit. Alternatively, host cells may be transfected with linear DNA using methods well known to those of skill in the art.

[0155] While the DNA provided herein may be expressed in any eukaryotic cell, including yeast cells such as P. pastoris [see, e.g., Cregg et al. (1987) Bio/Technolocy 5:479], mammalian expression systems for expression of the DNA encoding the human calcium channel subunits provided herein are preferred.

[0156] The heterologous DNA may be introduced by any method known to those of skill in the art, such as transfection with a vector encoding the heterologous DNA. Particularly preferred vectors for transfection of mammalian cells are the pSV2dhfr expression vectors, which contain the SV40 early promoter, mouse dhfr gene, SV40 polyadenylation and splice sites and sequences necessary for maintaining the vector in bacteria, cytomegalovirus (CMV) promoter-based vectors such as pcDNA1, or pcDNA-amp and MMTV promoter-based vectors. DNA encoding the human calcium channel subunits has been inserted in the vector pcDNA1 at a position immediately following the CMV promoter. The vector pcDNA1 is presently preferred.

[0157] Stably or transiently transfected mammalian cells may be prepared by methods known in the art by transfecting cells with an expression vector having a selectable marker gene such as the gene for thymidine kinase, dihydrofolate reductase, neomycin resistance or the like, and, for transient transfection, growing the transfected cells under conditions selective for cells expressing the marker gene. Functional voltage-dependent calcium channels have been produced in HEK 293 cells transfected with a derivative of the vector pcDNA1 that contains DNA encoding a human calcium channel subunit.

[0158] The heterologous DNA may be maintained in the cell as an episomal element or may be integrated into chromosomal DNA of the cell. The resulting recombinant cells may then be cultured or subcultured (or passaged, in the case of mammalian cells) from such a culture or a subculture thereof. Methods for transfection, injection and culturing recombinant cells are known to the skilled artisan. Eukaryotic cells in which DNA or RNA may be introduced, include any cells that are transfectable by such DNA or RNA or into which such DNA may be injected. Virtually any eukaryotic cell can serve as a vehicle for heterologous DNA. Preferred cells are those that can also express the DNA and RNA and most preferred cells are those that can form recombinant or heterologous calcium channels that include one or more subunits encoded by the heterologous DNA. Such cells may be identified empirically or selected from among those known to be readily transfected or injected. Preferred cells for introducing DNA include those that can be transiently or stably transfected and include, but are not limited to, cells of mammalian origin, such as COS cells, mouse L cells, CHO cells, human embryonic kidney cells, African green monkey cells and other such cells known to those of skill in the art, amphibian cells, such as Xenopus laevis oöcytes, or those of yeast such as Saccharomyces cerevisiae or Pichia pastoris. Preferred cells for expressing injected RNA transcripts or cDNA include Xenopus laevis oöcytes. Cells that are preferred for transfection of DNA are those that can be readily and efficiently transfected. Such cells are known to those of skill in the art or may be empirically identified. Preferred cells include DG44 cells and HEK 293 cells, particularly HEK 293 cells that can be frozen in liquid nitrogen and then thawed and regrown. Such HEK 293 cells are described, for example in U.S. Pat. No. 5,024,939 to Gorman [see, also Stillman et al. (1985) Mol. Cell. Biol. 5:2051-2060].

[0159] The cells may be used as vehicles for replicating heterologous DNA introduced therein or for expressing the heterologous DNA introduced therein. In certain embodiments, the cells are used as vehicles for expressing the heterologous DNA as a means to produce substantially pure human calcium channel subunits or heterologous calcium channels. Host cells containing the heterologous DNA may be cultured under conditions whereby the calcium channels are expressed. The calcium channel subunits may be purified using protein purification methods known to those of skill in the art. For example, antibodies, such as those provided herein, that specifically bind to one or more of the subunits may be used for affinity purification of the subunit or calcium channels containing the subunits.

[0160] Substantially pure subunits of a human calcium channel α₁ subunits of a human calcium channel, α₂ subunits of a human calcium channel, β subunits of a human calcium channel and γ subunits of a human calcium channel are provided. Substantially pure isolated calcium channels that contain at least one of the human calcium channel subunits are also provided. Substantially pure calcium channels that contain a mixture of one or more subunits encoded by the host cell and one or more subunits encoded by heterologous DNA or RNA that has been introduced into the cell are also provided. Substantially pure subtype- or tissue-type specific calcium channels are also provided.

[0161] In other embodiments, eukaryotic cells that contain heterologous DNA encoding at least one of an α₁ subunit of a human calcium channel, an α₂ subunit of a human calcium channel, a β subunit of a human calcium channel and a γ subunit of a human calcium channel are provided. In accordance with one preferred embodiment, the heterologous DNA is expressed in the eukaryotic cell and preferably encodes a human calcium channel α₁ subunit.

[0162] Expression of Heterologous Calcium Channels: Electrophysiology and Pharmacology

[0163] Electrophysiological methods for measuring calcium channel activity are known to those of skill in the art and are exemplified herein. Any such methods may be used in order to detect the formation of functional calcium channels and to characterize the kinetics and other characteristics of the resulting currents. Pharmacological studies may be combined with the electrophysiological measurements in order to further characterize the calcium channels.

[0164] With respect to measurement of the activity of functional heterologous calcium channels, preferably, endogenous ion channel activity and, if desired, heterologous channel activity of channels that do not contain the desired subunits, of a host cell can be inhibited to a significant extent by chemical, pharmacological and electrophysiological means, including the use of differential holding potential, to increase the S/N ratio of the measured heterologous calcium channel activity.

[0165] Thus, various combinations of subunits encoded by the DNA provided herein are introduced into eukaryotic cells. The resulting cells can be examined to ascertain whether functional channels are expressed and to determine the properties of the channels. In particularly preferred aspects, the eukaryotic cell which contains the heterologous DNA expresses it and forms a recombinant functional calcium channel activity. In more preferred aspects, the recombinant calcium channel activity is readily detectable because it is a type that is absent from the untransfected host cell or is of a magnitude and/or pharmacological properties or exhibits biophysical properties not exhibited in the untransfected cell.

[0166] The eukaryotic cells can be transfected with various combinations of the subunit subtypes provided herein. The resulting cells will provide a uniform population of calcium channels for study of calcium channel activity and for use in the drug screening assays provided herein. Experiments that have been performed have demonstrated the inadequacy of prior classification schemes.

[0167] Preferred among transfected cells is a recombinant eukaryotic cell with a functional heterologous calcium channel. The recombinant cell can be produced by introduction of and expression of heterologous DNA or RNA transcripts encoding an α₁ subunit of a human calcium channel, more preferably also expressing, a heterologous DNA encoding a β subunit of a human calcium channel and/or heterologous DNA encoding an α₂ subunit of a human calcium channel. Especially preferred is the expression in such a recombinant cell of each of the α₁, β and α₂ subunits encoded by such heterologous DNA or RNA transcripts, and optionally expression of heterologous DNA or an RNA transcript encoding a γ subunit of a human calcium channel.

[0168] The functional calcium channels may preferably include at least an α₁ subunit and a β subunit of a human calcium channel. Eukaryotic cells expressing these two subunits and also cells expressing additional subunits, have been prepared by transfection of DNA and by injection of RNA transcripts. Such cells have exhibited voltage-dependent calcium channel activity attributable to calcium channels that contain one or more of the heterologous human calcium channel subunits. For example, eukaryotic cells expressing heterologous calcium channels containing an α₂ subunit in addition to the α₁ subunit and a β subunit have been shown to exhibit increased calcium selective ion flow across the cellular membrane in response to depolarization, indicating that the α₂ subunit may potentiate calcium channel function. Cells that have been co-transfected with increasing ratios of α₂ to α₁ and the activity of the resulting calcium channels has been measured. The results indicate that increasing the amount of α₂-encoding DNA relative to the other transfected subunits increases calcium channel activity.

[0169] Eukaryotic cells which express heterologous calcium channels containing at least a human α₁ subunit, a human β subunit and a human α₂ subunit are preferred. Eukaryotic cells transformed with a composition containing cDNA or an RNA transcript that encodes an α₁ subunit alone or in combination with a β and/or an α₂ subunit may be used to produce cells that express functional calcium channels. Since recombinant cells expressing human calcium channels containing all of the human subunits encoded by the heterologous cDNA or RNA are especially preferred, it is desirable to inject or transfect such host cells with a sufficient concentration of the subunit-encoding nucleic acids to form calcium channels that contain the human subunits encoded by heterologous DNA or RNA. The precise amounts and ratios of DNA or RNA encoding the subunits may be empirically determined and optimized for a particular combination of subunits, cells and assay conditions.

[0170] In particular, mammalian cells have been transiently and stably transfected with DNA encoding one or more human calcium channel subunits. Such cells express heterologous calcium channels that exhibit pharmacological and electrophysiological properties that can be ascribed to human calcium channels. Such cells, however, represent homogeneous populations and the pharmacological and electrophysiological data provides insights into human calcium channel activity heretofore unattainable. For example, HEK cells that have been transiently transfected with DNA encoding the α_{1E-1}, α_{2b}, and β₁₋₃ subunits. The resulting cells transiently express these subunits, which form calcium channels that have properties that appear to be a pharmacologically distinct class of voltage-activated calcium channels distinct from those of L-, N-, T- and P-type channels. The observed α_{1E} currents were insensitive to drugs and toxins previously used to define other classes of voltage-activated calcium channels.

[0171] HEK cells that have been transiently transfected with DNA encoding α_{1B-1}, α_{2b}, and β₁₋₂ express heterologous calcium channels that exhibit sensitivity to ω-conotoxin and currents typical of N-type channels. It has been found that alteration of the molar ratios of α_{1B-1}, α_{2b} and β₁₋₂ introduced into the cells to achieve equivalent mRNA levels significantly increased the number of receptors per cell, the current density, and affected the K_{d} for ω-conotoxin.

[0172] The electrophysiological properties of these channels produced from α_{1B-1}, α_{2b}, and β₁₋₂ was compared with those of channels produced by transiently transfecting HEK cells with DNA encoding α_{1B-1}, α_{2b} and β₁₋₃. The channels exhibited similar voltage dependence of activation, substantially identical voltage dependence, similar kinetics of activation and tail currents that could be fit by a single exponential. The voltage dependence of the kinetics of inactivation was significantly different at all voltages examined.

[0173] In certain embodiments, the eukaryotic cell with a heterologous calcium channel is produced by introducing into the cell a first composition, which contains at least one RNA transcript that is translated in the cell into a subunit of a human calcium channel. In preferred embodiments, the subunits that are translated include an α₁ subunit of a human calcium channel. More preferably, the composition that is introduced contains an RNA transcript which encodes an α₁ subunit of a human calcium channel and also contains (1) an RNA transcript which encodes a β subunit of a human calcium channel and/or (2) an RNA transcript which encodes an α₂ subunit of a human calcium channel. Especially preferred is the introduction of RNA encoding an α₁, a β and an α₂ human calcium channel subunit, and, optionally, a γ subunit of a human calcium channel.

[0174] Methods for in vitro transcription of a cloned DNA and injection of the resulting RNA into eukaryotic cells are well known in the art. Transcripts of any of the full-length DNA encoding any of the subunits of a human calcium channel may be injected alone or in combination with other transcripts into eukaryotic cells for expression in the cells. Amphibian oöcytes are particularly preferred for expression of in vitro transcripts of the human calcium channel subunit cDNA clones provided herein. Amphibian oocytes that express functional heterologous calcium channels have been produced by this method.

[0175] Assays and Clinical Uses of the Cells and Calcium Channels Assays

[0176] Assays for Identifying Compounds that Modulate Calcium Channel Activity

[0177] Among the uses for eukaryotic cells which recombinantly express one or more subunits are assays for determining whether a test compound has calcium channel agonist or antagonist activity. These eukaryotic cells may also be used to select from among known calcium channel agonists and antagonists those exhibiting a particular calcium channel subtype specificity and to thereby select compounds that have potential as disease- or tissue-specific therapeutic agents.

[0178] In vitro methods for identifying compounds, such as calcium channel agonist and antagonists, that modulate the activity of calcium channels using eukaryotic cells that express heterologous human calcium channels are provided.

[0179] In particular, the assays use eukaryotic cells that express heterologous human calcium channel subunits encoded by heterologous DNA provided herein, for screening potential calcium channel agonists and antagonists which are specific for human calcium channels and particularly for screening for compounds that are specific for particular human calcium channel subtypes. Such assays may be used in conjunction with methods of rational drug design to select among agonists and antagonists, which differ slightly in structure, those particularly useful for modulating the activity of human calcium channels, and to design or select compounds that exhibit subtype- or tissue-specific calcium channel antagonist and agonist activities.

[0180] These assays should accurately predict the relative therapeutic efficacy of a compound for the treatment of certain disorders in humans. In addition, since subtype- and tissue-specific calcium channel subunits are provided, cells with tissue-specific or subtype-specific recombinant calcium channels may be prepared and used in assays for identification of human calcium channel tissue- or subtype-specific drugs.

[0181] Desirably, the host cell for the expression of calcium channel subunits does not produce endogenous calcium channel subunits of the type or in an amount that substantially interferes with the detection of heterologous calcium channel subunits in ligand binding assays or detection of heterologous calcium channel function, such as generation of calcium current, in functional assays. Also, the host cells preferably should not produce endogenous calcium channels which detectably interact with compounds having, at physiological concentrations (generally nanomolar or picomolar concentrations), affinity for calcium channels that contain one or all of the human calcium channel subunits provided herein.

[0182] With respect to ligand binding assays for identifying a compound which has affinity for calcium channels, cells are employed which express, preferably, at least a heterologous α₁ subunit. Transfected eukaryotic cells which express at least an α₁ subunit may be used to determine the ability of a test compound to specifically bind to heterologous calcium channels by, for example, evaluating the ability of the test compound to inhibit the interaction of a labeled compound known to specifically interact with calcium channels. Such ligand binding assays may be performed on intact transfected cells or membranes prepared therefrom.

[0183] The capacity of a test compound to bind to or otherwise interact with membranes that contain heterologous calcium channels or subunits thereof may be determined by using any appropriate method, such as competitive binding analysis, such as Scatchard plots, in which the binding capacity of such membranes is determined in the presence and absence of one or more concentrations of a compound having known affinity for the calcium channel. Where necessary, the results may be compared to a control experiment designed in accordance with methods known to those of skill in the art. For example, as a negative control, the results may be compared to those of assays of an identically treated membrane preparation from host cells which have not been transfected with one or more subunit-encoding nucleic acids.

[0184] The assays involve contacting the cell membrane of a recombinant eukaryotic cell which expresses at least one subunit of a human calcium channel, preferably at least an α₁ subunit of a human calcium channel, with a test compound and measuring the ability of the test compound to specifically bind to the membrane or alter or modulate the activity of a heterologous calcium channel on the membrane.

[0185] In preferred embodiments, the assay uses a recombinant cell that has a calcium channel containing an α₁ subunit of a human calcium channel in combination with a β subunit of a human calcium channel and/or an α₂ subunit of a human calcium channel. Recombinant cells expressing heterologous calcium channels containing each of the α₁, β and α₂ human subunits, and, optionally, a γ subunit of a human calcium channel are especially preferred for use in such assays.

[0186] In certain embodiments, the assays for identifying compounds that modulate calcium channel activity are practiced by measuring the calcium channel activity of a eukaryotic cell having a heterologous, functional calcium channel when such cell is exposed to a solution containing the test compound and a calcium channel-selective ion and comparing the measured calcium channel activity to the calcium channel activity of the same cell or a substantially identical control cell in a solution not containing the test compound. The cell is maintained in a solution having a concentration of calcium channel-selective ions sufficient to provide an inward current when the channels open. Recombinant cells expressing calcium channels that include each of the α₁, β and α₂ human subunits, and, optionally, a γ subunit of a human calcium channel, are especially preferred for use in such assays. Methods for practicing such assays are known to those of skill in the art. For example, for similar methods applied with Xenopus laevis oöcytes and acetylcholine receptors, see, Mishina et al. [(1985) Nature 313:364] and, with such oöcytes and sodium channels (see, Noda et al. (1986) Nature 322:826-828]. For similar studies which have been carried out with the acetylcholine receptor, see, e.g., Claudio et al. [(1987) Science 238:1688-1694].

[0187] Functional recombinant or heterologous calcium channels may be identified by any method known to those of skill in the art. For example, electrophysiological procedures for measuring the current across an ion-selective membrane of a cell, which are well known, may be used. The amount and duration of the flow of calcium-selective ions through heterologous calcium channels of a recombinant cell containing DNA encoding one or more of the subunits provided herein has been measured using electrophysiological recordings using a two electrode and the whole-cell patch clamp techniques. In order to improve the sensitivity of the assays, known methods can be used to eliminate or reduce non-calcium currents and calcium currents resulting from endogenous calcium channels, when measuring calcium currents through recombinant channels. For example, the DHP Bay K 8644 specifically enhances L-type calcium channel function by increasing the duration of the open state of the channels [see, e.g., Hess, J. B., et al. (1984) Nature 311:538-544]. Prolonged opening of the channels results in calcium currents of increased magnitude and duration. Tail currents can be observed upon repolarization of the cell membrane after activation of ion channels by a depolarizing voltage command. The opened channels require a finite time to close or “deactivate” upon repolarization, and the current that flows through the channels during this period is referred to as a tail current. Because Bay K 8644 prolongs opening events in calcium channels, it tends to prolong these tail currents and make them more pronounced.

[0188] In practicing these assays, stably or transiently transfected cells or injected cells that express voltage-dependent human calcium channels containing one or more of the subunits of a human calcium channel desirably may be used in assays to identify agents, such as calcium channel agonists and antagonists, that modulate calcium channel activity. Functionally testing the activity of test compounds, including compounds having unknown activity, for calcium channel agonist or antagonist activity to determine if the test compound potentiates, inhibits or otherwise alters the flow of calcium ions or other ions through a human calcium channel can be accomplished by (a) maintaining a eukaryotic cell which is transfected or injected to express a heterologous functional calcium channel capable of regulating the flow of calcium channel-selective ions into the cell in a medium containing calcium channel-selective ions (i) in the presence of and (ii) in the absence of a test compound; (b) maintaining the cell under conditions such that the heterologous calcium channels are substantially closed and endogenous calcium channels of the cell are substantially inhibited (c) depolarizing the membrane of the cell maintained in step (b) to an extent and for an amount of time sufficient to cause (preferably, substantially only) the heterologous calcium channels to become permeable to the calcium channel-selective ions; and (d) comparing the amount and duration of current flow into the cell in the presence of the test compound to that of the current flow into the cell, or a substantially similar cell, in the absence of the test compound.

[0189] The assays thus use cells, provided herein, that express heterologous functional calcium channels and measure functionally, such as electrophysiologically, the ability of a test compound to potentiate, antagonize or otherwise modulate the magnitude and duration of the flow of calcium channel-selective ions, such as Ca²⁺ or Ba²⁺, through the heterologous functional channel. The amount of current which flows through the recombinant calcium channels of a cell may be determined directly, such as electrophysiologically, or by monitoring an independent reaction which occurs intracellularly and which is directly influenced in a calcium (or other) ion dependent manner.

[0190] Any method for assessing the activity of a calcium channel may be used in conjunction with the cells and assays provided herein. For example, in one embodiment of the method for testing a compound for its ability to modulate calcium channel activity, the amount of current is measured by its modulation of a reaction which is sensitive to calcium channel-selective ions and uses a eukaryotic cell which expresses a heterologous calcium channel and also contains a transcriptional control element operatively linked for expression to a structural gene that encodes an indicator protein. The transcriptional control element used for transcription of the indicator gene is responsive in the cell to a calcium channel-selective ion, such as Ca²⁺ and Ba²⁺. The details of such transcriptional based assays are described in commonly owned PCT International Patent Application No. PCT/US91/5625, filed Aug. 7, 1991, which claims priority to copending commonly owned allowed U.S. application Ser. No. 07/563,751, filed Aug. 7, 1990; see also, commonly owned published PCT International Patent Application PCT US92/11090, which corresponds to co-pending U.S. applications Ser. Nos. 08/229,150 and 08/244,985. The contents of these applications are herein incorporated by reference thereto.

[0191] Assays for Diagnosis of LES

[0192] LES is an autoimmune disease characterized by an insufficient release of acetylcholine from motor nerve terminals which normally are responsive to nerve impulses. Immunoglobulins (IgG) from LES patients block individual voltage-dependent calcium channels and thus inhibit calcium channel activity [Kim and Neher, Science 239:405-408 (1988)]. A diagnostic assay for Lambert Eaton Syndrome (LES) is provided herein. The diagnostic assay for LES relies on the immunological reactivity of LES IgG with the human calcium channels or particular subunits alone or in combination or expressed on the surface of recombinant cells. For example, such an assay may be based on immunoprecipitation of LES IgG by the human calcium channel subunits and cells that express such subunits provided herein.

[0193] Clinical Applications

[0194] In relation to therapeutic treatment, of various disease states, the availability of DNA encoding human calcium channel subunits permits identification of any alterations in such genes (e.g., mutations) which may correlate with the occurrence of certain disease states. In addition, the creation of animal models of such disease states becomes possible, by specifically introducing such mutations into synthetic DNA fragments that can then be introduced into laboratory animals or in vitro assay systems to determine the effects thereof.

[0195] Also, genetic screening can be carried out using the nucleotide sequences as probes. Thus, nucleic acid samples from subjects having pathological conditions suspected of involving alteration/modification of any one or more of the calcium channel subunits can be screened with appropriate probes to determine if any abnormalities exist with respect to any of the endogenous calcium channels. Similarly, subjects having a family history of disease states related to calcium channel dysfunction can be screened to determine if they are also predisposed to such disease states.

### EXAMPLES

[0196] The following examples are included for illustrative purposes only and are not intended to limit the scope of the invention.

### Example I

[0197] Preparation of Libraries Used for Isolation of DNA Encoding Human Neuronal Voltage-Dependent Calcium Channel Subunits

[0198] A. RNA Isolation

[0199] 1. IMR32 Cells

[0200] IMR32 cells were obtained from the American Type Culture Collection (ATCC Accession No. CCL127, Rockville, Md.) and grown in DMEM, 10% fetal bovine serum, 1% penicillin/streptomycin (GIBCO, Grand Island, N.Y.) plus 1.0 mM dibutyryl cAMP (dbcAMP) for ten days. Total RNA was isolated from the cells according to the procedure described by H. C. Birnboim [(1988) Nucleic Acids Research 16:1487-1497]. Poly(A⁺) RNA was selected according to standard procedures [see, e.g., Sambrook et al. (1989) Molecular Cloning, A Laboratory Manual, Cold Spring Harbor Laboratory Press; pg. 7.26-7.29].

[0201] 2. Human Thalamus Tissue

[0202] Human thalamus tissue (2.34 g), obtained from the National Neurological Research Bank, Los Angeles, Calif., that had been stored frozen at −70° C. was pulverized using a mortar and pestle in the presence of liquid nitrogen and the cells were lysed in 12 ml of lysis buffer (5 M guanidinium isothiocyanate, 50 mM TRIS, pH 7.4, 10 mM EDTA, 5% β-mercaptoethanol). Lysis buffer was added to the lysate to yield a final volume of 17 ml. N-laurylsarcosine and CsCl were added to the mixture to yield final concentrations of 4% and 0.01 g/ml, respectively, in a final volume of 18 ml.

[0203] The sample was centrifuged at 9,000 rpm in a Sorvall SS34 rotor for 10 min at room temperature to remove the insoluble material as a pellet. The supernatant was divided into two equal portions and each was layered onto a 2-ml cushion of a solution of 5.7 M CsCl, 0.1 M EDTA contained in separate centrifuge tubes to yield approximately 9 ml per tube. The samples were centrifuged in an SW41 rotor at 37,000 rpm for 24 h at 20° C.

[0204] After centrifugation, each RNA pellet was resuspended in 3 ml ETS (10 mM TRIS, pH 7.4, 10 mM EDTA, 0.2% SDS) and combined into a single tube. The RNA was precipitated with 0.25 M NaCl and two volumes of 95% ethanol.

[0205] The precipitate was collected by centrifugation and resuspended in 4 ml PK buffer (0.05 M TRIS, pH 8.4, 0.14 M NaCl, 0.01 M EDTA, 1% SDS). Proteinase K was added to the sample to a final concentration of 200 μg/ml. The sample was incubated at 22° C. for 1 h, followed by extraction with an equal volume of phenol:chloroform:isoamylalcohol (50:48:2) two times, followed by one extraction with an equal volume of chloroform:isoamylalcohol (24:1). The RNA was precipitated with ethanol and NaCl. The precipitate was resuspended in 400 μl of ETS buffer. The yield of total RNA was approximately 1.0 mg. Poly A⁺ RNA (30 μg) was isolated from the total RNA according to standard methods as stated in Example I.A.1.

[0206] B. Library Construction

[0207] Double-stranded cDNA was synthesized according to standard methods [see, e.g., Sambrook et al. (1989) IN: Molecular Cloning, A Laboratory Manual, Cold Spring Harbor Laboratory Press, Chapter 8]. Each library was prepared in substantially the same manner except for differences in: 1) the oligonucleotide used to prime the first strand cDNA synthesis, 2) the adapters that were attached to the double-stranded cDNA, 3) the method used to remove the free or unused adapters, and 4) the size of the fractionated cDNA ligated into the λ phage vector.

[0208] 1. IMR32 cDNA Library #1

[0209] Single-stranded cDNA was synthesized using IMR32 poly(A⁺) RNA (Example I.A.1.) as a template and was primed using oligo (dT)₁₂₋₁₈ (Collaborative Research Inc., Bedford, Mass.). The single-stranded cDNA was converted to double-stranded cDNA and the yield was approximately 2 μg. EcoI adapters:

[0210] 5′-AATTCGGTACGTACACTCGAGC-3′=22-mer (SEQ ID No. 15)

[0211] 3′-GCCATGCATGTGAGCTCG-5′=18-mer (SEQ ID No. 16)

[0212] also containing SnaBI and XhoI restriction sites were then added to the double-stranded cDNA according to the following procedure.

[0213] a. Phosphorylation of 18-mer

[0214] The 18-mer was phosphorylated using standard methods [see, e.g., Sambrook et al. (1989) IN: Molecular Cloning, A Laboratory Manual, Cold Spring Harbor Laboratory Press, Chapter 8] by combining in a 10 μl total volume the 18-mer (225 pmoles) with [³²P]γ-ATP (7000 Ci/mmole; 1.0 μl) and kinase (2 U) and incubating at 37° C. for 15 minutes. After incubation, 1 μl 10 mM ATP and an additional 2 U of kinase were added and incubated at 37° C. for 15 minutes. Kinase was then inactivated by boiling for 10 minutes.

[0215] b. Hybridization of 22-mer

[0216] The 22-mer was hybridized to the phosphorylated 18-mer by addition of 225 pmoles of the 22-mer (plus water to bring volume to 15 μl), and incubation at 65° C. for 5 minutes. The reaction was then allowed to slow cool to room temperature.

[0217] The adapters were thus present at a concentration of 15 pmoles/μl, and were ready for cDNA-adapter ligation.

[0218] C. Ligation of Adapters to cDNA

[0219] After the EcoRI, SnaBI, XhoI adapters were ligated to the double-stranded cDNA using a standard protocol [see, e.g., Sambrook et al. (1989) IN: Molecular Cloning, A Laboratory Manual, Cold Spring Harbor Laboratory Press, Chapter 8], the ligase was inactivated by heating the mixture to 72° C. for 15 minutes. The following reagents were added to the cDNA ligation reaction and heated at 37° C. for 30 minutes: cDNA ligation reaction (20 μl), water (24 μl), 10× kinase buffer (3 μl), 10 mM ATP (1 μl) and kinase (2 μl of 2 U/μl). The reaction was stopped by the addition of 2 μl 0.5M EDTA, followed by one phenol/chloroform extraction and one chloroform extraction.

[0220] d. Size Selection and Packaging of cDNA

[0221] The double-stranded cDNA with the EcoRI, SnaBI, XhoI adapters ligated was purified away from the free or unligated adapters using a 5 ml Sepharose CL-4B column (Sigma, St. Louis, Mo.). 100 μl fractions were collected and those containing the cDNA, determined by monitoring the radioactivity, were pooled, ethanol precipitated, resuspended in TE buffer and loaded onto a 1% agarose gel. After the electrophoresis, the gel was stained with ethidium bromide and the 1 to 3 kb fraction was cut from the gel. The cDNA embedded in the agarose was eluted using the “Geneluter Electroelution System” (Invitrogen, San Diego, Calif.). The eluted cDNA was collected by ethanol precipitation and resuspended in TE buffer at 0.10 pmol/μl. The cDNA was ligated to 1 μg of EcoRI digested, dephosphorylated λgt11 in a 5 μl reaction volume at a 2- to 4-fold molar excess ratio of cDNA over the λgt11 vector. The ligated λgt11 containing the cDNA insert was packaged into λ phage virions in vitro using the Gigapack (Stratagene, La Jolla, Calif.) kit. The packaged phage were plated on an E. coli Y1088 bacterial lawn in preparation for screening.

[0222] 2. IMR32 cDNA Library #2

[0223] This library was prepared as described (Example I.B.1.) with the exception that 3 to 9 kb cDNA fragments were ligated into the λgt11 phage vector rather than the 1 to 3 kb fragments.

[0224] 3. IMR32 cDNA Library #3

[0225] IMR32 cell poly(A⁺) RNA (Example I.A.1.) was used as a template to synthesize single-stranded cDNA. The primers for the first strand cDNA synthesis were random primers (hexadeoxy-nucleotides [pd(N)₆] Cat #5020-1, Clontech, Palo Alto, Calif.). The double-stranded cDNA was synthesized, EcoRI, SnaBI, XhoI adapters were added to the cDNA, the unligated adapters were removed, and the double-stranded cDNA with the ligated adapters was fractionated on an agarose gel, as described in Example I.B.1. The cDNA fraction greater than 1.8 kb was eluted from the agarose, ligated into λgt11, packaged, and plated into a bacterial lawn of Y1088 (as described in Example I.B.1.).

[0226] 4. IMR32 cDNA Library #4

[0227] IMR32 cell poly(A⁺) RNA (Example I.A.1.) was used as a template to synthesize single-stranded cDNA. The primers for the first strand cDNA synthesis were oligonucleotides: 89-365a specific for the α_{1D} (VDCC III) type α₁-subunit (see Example II.A.) coding sequence (the complementary sequence of nt 2927 to 2956, SEQ ID No. 1), 89-495 specific for the α_{1C} (VDCC II) type α₁-subunit (see Example II.B.) coding sequence (the complementary sequence of nt 852 to 873, SEQ ID No. 3), and 90-12 specific for the α_{1C}-subunit coding sequence (the complementary sequence of nt 2496 to 2520, SEQ ID No. 3). The cDNA library was then constructed as described (Example I.B.3), except that the cDNA size-fraction greater than 1.5 kb was eluted from the agarose rather than the greater than 1.8 kb fraction.

[0228] 5. IMR32 cDNA Library #5

[0229] The cDNA library was constructed as described (Example I.B.3.) with the exception that the size-fraction greater than 1.2 kb was eluted from the agarose rather than the greater than 1.8 kb fraction.

[0230] 6. Human Thalamus cDNA Library #6

[0231] Human thalamus poly (A⁺) RNA (Example I.A.2.) was used as a template to synthesize single-stranded cDNA. Oligo (dT) was used to prime the first strand synthesis (Example I.B.1.). The double-stranded cDNA was synthesized (Example I.B.1.) and EcoRI, KpnI, NcoI adapters of the following sequence:

[0232] 5′ CCATGGTACCTTCGTTGACG 3′=20-mer (SEQ ID NO. 17)

[0233] 3′ GGTACCATGGAAGCAACTGCTTAA 5′=24-mer (SEQ ID NO. 18)

[0234] were ligated to the double-stranded cDNA as described (Example I.B.1.) with the 20-mer replacing the 18-mer and the 24-mer replacing the 22-mer. The unligated adapters were removed by passing the cDNA-adapter mixture through a 1 ml Bio Gel A-50 (Bio-Rad Laboratories, Richmond, Calif.) column. Fractions (30 μl) were collected and 1 μl of each fraction in the first peak of radioactivity was electrophoresed on a 1% agarose gel. After electrophoresis, the gel was dried on a vacuum gel drier and exposed to x-ray film. The fractions containing cDNA fragments greater than 600 bp were pooled, ethanol precipitated, and ligated into λgt11 (Example I.B.1.). The construction of the cDNA library was completed as described (Example I.B.1.).

[0235] C. Hybridization and Washing Conditions

[0236] Hybridization of radiolabelled nucleic acids to immobilized DNA for the purpose of screening cDNA libraries, DNA Southern transfers, or northern transfers was routinely performed in standard hybridization conditions (hybridization: 50% deionized formamide, 200 μg/ml sonicated herring sperm DNA (Cat #223646, Boehringer Mannheim Biochemicals, Indianapolis, Ind.), 5×SSPE, 5× Denhardt's, 42° C.; wash: 0.2×SSPE, 0.1% SDS, 65° C.]. The recipes for SSPE and Denhardt's and the preparation of deionized formamide are described, for example, in Sambrook et al. (1989) Molecular Cloning, A Laboratory Manual, Cold Spring Harbor Laboratory Press, Chapter 8). In some hybridizations, lower stringency conditions were used in that 10% deionized formamide replaced 50% deionized formamide described for the standard hybridization conditions.

[0237] The washing conditions for removing the non-specific probe from the filters was either high, medium, or low stringency as described below:

[0238] 1) high stringency: 0.1×SSPE, 0.1% SDS, 65° C.

[0239] 2) medium stringency: 0.2×SSPE, 0.1% SDS, 50° C.

[0240] 3) low stringency: 1.0×SSPE, 0.1% SDS, 50° C.

[0241] It is understood that equivalent stringencies may be achieved using alternative buffers, salts and temperatures.

### Example II

[0242] Isolation of DNA Encoding the Human Neuronal Calcium Channel α₁ Subunit

[0243] A. Isolation of DNA Encoding the α_{1D} Subunit

[0244] 1. Reference List of Partial α_{1D} cDNA Clones

[0245] Numerous α_{1D}-specific cDNA clones were isolated in order to characterize the complete α_{1D} coding sequence plus portions of the 5′ and 3′ untranslated sequences. SEQ ID No. 1 shows the complete α_{1D} DNA coding sequence, plus 510 nucleotides of α_{1D} 5′ untranslated sequence ending in the guanidine nucleotide adjacent to the adenine nucleotide of the proposed initiation of translation as well as 642 nucleotides of 3′ untranslated sequence. Also shown in SEQ ID No. 1 is the deduced amino acid sequence. A list of partial cDNA clones used to characterize the α_{1D} sequence and the nucleotide position of each clone relative to the full-length α_{1D} cDNA sequence, which is set forth in SEQ ID No. 1, is shown below. The isolation and characterization of these clones are described below (Example II.A.2.).

| | | | |
|---|---|---|---|
| IMR32 | 1.144 | nt 1 to 510 of | SEQ ID No. 1 |
| | | 5′ untranslated sequence, | |
| | | nt 511 to 2431, | SEQ ID No. 1 |
| IMR32* | 1.136 | nt 1627 to 2988, | SEQ ID No. 1 |
| | | nt 1 to 104 of SEQ ID No. 2 | |
| | | additional exon, | |
| IMR32@ | 1.80 | nt 2083 to 6468, | SEQ ID No. 1 |
| IMR32# | 1.36 | nt 2857 to 4281, | SEQ ID No. 1 |
| IMR32 | 1.163 | nt 5200 to 7635, | SEQ ID No. 1 |

*5′ of nt 1627, IMR32 1.136 encodes an intron and an additional exon described in Example II.A.2.d.
@IMR32 1.80 contains two deletions, nt 2984 to 3131 and nt 5303 to 5349 (SEQ ID No. 1). The 148 nt deletion (nt 2984 to 3131) was corrected by performing a polymerase chain reaction described in Example II.A.3.b.
#IMR32 1.36 contains a 132 nt deletion (nt 3081 to 3212)

[0246] 2. Isolation and Characterization of Individual Clones Listed in Example II.A.1.

[0247] a. IMR32 1.36

[0248] Two million recombinants of the IMR32 cDNA library #1 (Example I.B.1.) were screened in duplicate at a density of approximately, 200,000 plaques per 150 mm plate using a mixture of radiolabelled fragments of the coding region of the rabbit skeletal muscle calcium channel α₁ cDNA [for the sequence of the rabbit skeletal muscle calcium channel α₁ subunit cDNA, see, Tanabe et al. (1987). Nature 328:313-318]:

| Fragment | Nucleotides |
|---|---|
| KpnI-EcoRI | −78 to 1006 |
| EcoRI-XhoI | 1006 to 2653 |
| ApaI-ApaI | 3093 to 4182 |
| Bg1II-SacI | 4487 to 5310 |

[0249] The hybridization was performed using low stringency hybridization conditions (Example I.C.) and the filters were washed under low stringency (Example I.C.). Only one α_{1D}-specific recombinant (IMR32 1.36) of the 2×10⁶ screened was identified. IMR32 1.36 was plaque purified by standard methods (J. Sambrook et al. (1989) Molecular Cloning, A Laboratory Manual, Cold Spring Harbor Laboratory Press, Chapter 8,) subcloned into pGEM3 (Promega, Madison, Wis.) and characterized by DNA sequencing.

[0250] b. IMR32 1.80

[0251] Approximately 1×10⁶ recombinants of the IMR32 cDNA library #2 (Example I.B.2.) were screened in duplicate at a density of approximately 100,000 plaques per 150 mm plate using the IMR32 1.36 cDNA fragment (Example II.A.1) as a probe. Standard hybridization conditions were used; and the filters were washed under high stringency (Example I.C.). Three positive plaques were identified one of which was IMR32 1.80. 1MR32 1.80 was plaque purified by standard methods, restriction mapped, subcloned, and characterized by DNA sequencing.

[0252] c. IMR32 1.144

[0253] Approximately 1×10⁶ recombinants of the IMR32 cDNA library #3 (Example I.B.3) were screened with the EcoRI-PvuII fragment (nt 2083 to 2518, SEQ ID No. 1) of IMR32 1.80. The hybridization was performed using standard hybridization conditions (Example I.C.) and the filters were washed under high stringency (Example I.C.). Three positive plaques were identified one of which was IMR32 1.144. IMR32 1.144 was plaque purified, restriction mapped, and the cDNA insert was subcloned into pGEM7Z (Promega, Madison, Wis.) and characterized by DNA sequencing. This characterization revealed that IMR32 1.144 has a series of ATG codons encoding seven possible initiating methionines (nt 511 to 531, SEQ ID No. 1). Nucleic acid amplification analysis, and DNA sequencing of cloned nucleic acid amplification analysis products encoding these seven ATG codons confirmed that this sequence is present in the α_{1D} transcript expressed in dbcAMP-induced IMR32 cells.

[0254] d. IMR32 1.136

[0255] Approximately 1×10⁶ recombinants of the IMR32 cDNA library #4 (Example I.B.4) were screened with the EcoRI-PvuII fragment (nt 2083 to 2518, SEQ ID No. 1) of IMR32 1.80 (Example II.A.1.). The hybridization was performed using standard hybridization conditions (Example I.C.) and the filters were washed under high stringency (Example I.C.). Six positive plaques were identified one of which was IMR32 1.136. IMR32 1.136 was plaque purified, restriction mapped, and the cDNA insert was subcloned into a standard plasmid vector, pSP72 (Promega, Madison, Wis.), and characterized by DNA sequencing. This characterization revealed that IMR32 1.136 encodes an incompletely spliced α_{1D} transcript. The clone contains nucleotides 1627 to 2988 of SEQ ID No. 1 preceded by an approximate 640 bp intron. This intron is then preceded by a 104 nt exon (SEQ ID No. 2) which is an alternative exon encoding the IS6 transmembrane domain [see, e.g., Tanabe et al. (1987) Nature 328:313-318 for a description of the IS1 to IVS6 transmembrane terminology] of the α_{1D} subunit and can replace nt 1627 to 1730, SEQ. ID No. 1, to produce a completely spliced α_{1D} transcript.

[0256] e. IMR32 1.163

[0257] Approximately 1×10⁶ recombinants of the IMR32 cDNA library #3 (Example I.B.3.) were screened with the NcoI-XhoI fragment of IMR32 1.80 (Example II.A.1.) containing nt 5811 to 6468 (SEQ ID No. 1). The hybridization was performed using standard hybridization conditions (Example I.C.) and the filters were washed under high stringency (Example I.C.). Three positive plaques were identified one of which was IMR32 1.163. IMR32 1.163 was plaque purified, restriction mapped, and the cDNA insert was subcloned into a standard plasmid vector, pSP72 (Promega, Madison, Wis.), and characterized by DNA sequencing. This characterization revealed that IMR32 1.163 contains the α_{1D} termination codon, nt 6994 to 6996 (SEQ ID No. 1).

[0258] 3. Construction of a Full-Length α_{1D} cDNA [pVDCCIII(A)]

[0259] α_{1D} cDNA clones IMR32 1.144, IMR32 1.136, IMR32 1.80, and IMR32 1.163 (Example II.A.2.) overlap and include the entire α_{1D} coding sequence, nt 511 to 6993 (SEQ ID No. 1), with the exception of a 148 bp deletion, nt 2984 to 3131 (SEQ ID No. 1). Portions of these partial cDNA clones were ligated to generate a full-length α_{1D} cDNA in a eukaryotic expression vector. The resulting vector was called PVDCCIII(A); The construction of PVDCCIII(A) was performed in four steps described in detail below: (1) the construction of pVDCCIII/5′ using portions of IMR32 1.144, IMR32 1.136, and IMR32 1.80, (2) the construction of pVDCCIII/5′.3 that corrects the 148 nt deletion in the IMR32 1.80 portion of pVDCCIII/5′, (3) the construction of pVDCCIII/3′.1 using portions of IMR32 1.80 and IMR32 1.163, and (4) the ligation of a portion of the pVDCCIII/5′.3 insert, the insert of pVDCCIII/3′.1, and pcDNA1 (Invitrogen, San Diego, Calif.) to form PVDCCIII(A). The vector pcDNA1 is a eukaryotic expression vector containing a cytomegalovirus. (CMV) promoter which is a constitutive promoter recognized by mammalian host cell RNA polymerase II.

[0260] Each of the DNA fragments used in preparing the full-length construct was purified by electrophoresis through an agarose gel onto DE81 filter paper (Whatman, Clifton, N.J.) and elution from the filter paper using 1.0 M NaCl, 10 mM TRIS, pH 8.0, 1 mM EDTA. The ligations typically were performed in a 10 μl reaction volume with an equal molar ratio of insert fragment and a two-fold molar excess of the total insert relative to the vector. The amount of DNA used was normally about 50 ng to 100 ng.

[0261] a. pVDCCIII/5′

[0262] To construct pVDCCIII/5′, IMR32 1.144 (Example II.A.2.c.) was digested with XhoI and EcoRI and the fragment containing the vector (pGEM7Z), α_{1D} nt 1 to 510 (SEQ ID No. 1), and α_{1D} nt 511 to 1732 (SEQ ID No. 1) was isolated by gel electrophoresis. The EcoRI-ApaI fragment of IMR32 1.136 (Example II.A.2.d.) nucleotides 1733 to 2671 (SEQ ID No. 1) was isolated, and the ApaI-HindIII fragment of IMR32 1.80 (Example II.A.2.b.), nucleotides 2672 to 4492 (SEQ ID No. 1) was isolated. The three DNA clones were ligated to form pVDCCIII/5′ containing nt 1 to 510 (5′ untranslated sequence; SEQ ID No. 1) and nt 511 to 4492 (SEQ ID No. 1).

[0263] b. pVDCCIII/5′.3

[0264] Comparison of the IMR32 1.36 and IMR32 1.80 DNA sequences revealed that these two cDNA clones differ through the α_{1D} coding sequence, nucleotides 2984 to 3212. nucleic acid amplification analysis of IMR32 1.80 and dbcAMP-induced (1.0 mM, 10 days) IMR32 cytoplasmic RNA (isolated according to Ausubel, F. M. et al. (Eds) (1988) Current Protocols in Molecular Biology, John Wiley and Sons, New York) revealed, that IMR32 1.80 had a 148 nt deletion, nt 2984 to 3131 (SEQ ID No. 1), and that IMR32 1.36 had a 132 nt deletion, nt 3081 to 3212. To perform the nucleic acid amplification analysis, the amplification reaction was primed with α_{1D}-specific oligonucleotides 112 (nt 2548 to 2572, SEQ ID. No. 1) and 311 (the complementary sequence of nt 3928 to 3957, SEQ ID No. 1). These products were then reamplified using α_{1D}-specific oligonucleotides 310 (nt 2583 to 2608 SEQ ID No. 1) and 312 (the complementary sequence of nt 3883 to 3909). This reamplified product, which contains AccI and BglII restriction sites, was digested with AccI and BglII and the AccI-BglII fragment, nt 2765 to 3890 (SEQ ID No. 1) was cloned into AccI-BglII digested pVDCCIII/5′ to replace the AccI-BglII pVDCCIII/5′ fragment that had the deletion. This new construct was named pVDCCIII/5′.3. DNA sequence determination of pVDCCIII/5′.3 through the amplified region confirmed the 148 nt deletion in IMR32 1.80.

[0265] c. pVDCCIII/3′.1

[0266] To construct pVDCCIII/3′.1, the cDNA insert of IMR32 1.163 (Example II.A.2.e.) was subcloned into pBluescript II (Stratagene, La Jolla, Calif.) as an XhoI fragment. The XhoI sites on the cDNA fragment were furnished by the adapters used to construct the cDNA library (Example I.B.3.). The insert was oriented such that the translational orientation of the insert of IMR32 1.163 was opposite to that of the lacZ gene present in the plasmid, as confirmed by analysis of restriction enzyme digests of the resulting plasmid. This was done to preclude the possibility of expression of α_{1D} sequences in DH5α cells transformed with this plasmid due to fusion with the lacZ gene. This plasmid was then digested with HindIII and BglII and the HindIII-BglII fragment (the HindIII site comes from the vector and the BglII site is at nt 6220, SEQ ID No. 1) was eliminated, thus deleting nt 5200 to 6220 (SEQ ID No. 1) of the IMR32 1.163 clone and removing this sequence from the remainder of the plasmid which contained the 3′ BglII-XhoI fragment, nt 6221 to 7635 (SEQ ID No. 1). pVDCCIII/3′.1 was then made by splicing together the HindIII-PvuII fragment from IMR32 1.80 (nucleotides 4493-5296, SEQ ID No. 1), the PvuII-BglII fragment of IMR32 1.163 (nucleotides 5294 to 6220, SEQ ID No. 1) and the HindIII-BglII-digested pBluescript plasmid containing the 3′ BglII/XhoI IMR32 1.163 fragment (nt 6221 to 7635, SEQ ID No. 1).

[0267] d. pVDCCIII(A): the Full-Length α_{1D} Construct

[0268] To construct pVDCCIII(A), the DraI-HindIII fragment (5′ untranslated sequence nt 330 to 510, SEQ ID No. 1 and coding sequence nt 511 to 4492, SEQ ID No. 1) of pVDCCIII/5′.3 (Example II.A.3.b.) was isolated; the HindIII-XhoI fragment of pVDCCIII/3′.1 (containing nt 4493 to 7635, SEQ ID No. 1, plus the XhoI site of the adapter) (Example II.A.3.c.) was isolated; and the plasmid vector, pcDNA1, was digested with EcoRV and XhoI and isolated on an agarose gel. The three DNA fragments were ligated and MC1061-P3 (Invitrogen, San Diego, Calif.) was transformed. Isolated clones were analyzed by restriction mapping and DNA sequencing and PVDCCIII(A) was identified which had the fragments correctly ligated together: DraI-HindIII, HindIII-XhoI, XhoI-EcoRV with the blunt-end DraI and EcoRV site ligating together to form the circular plasmid.

[0269] The amino-terminus of the α_{1D} subunit is encoded by the seven consecutive 5′ methionine codons (nt 511 to 5311 SEQ ID No. 1). This 5′ portion plus nt 532 to 537, encoding two lysine residues, were deleted from pVDCCIII(A) and replaced with an efficient ribosomal binding site (5′-ACCACC-3′) to form pVDCCIII.RBS(A). Expression experiments in which transcripts of this construct were injected into Xenopus laevis oöcytes did not result in an enhancement in the recombinant voltage-dependent calcium channel expression level relative to the level of expression in oöcytes injected with transcripts of pVDCCIII(A).

[0270] B. Isolation of DNA Encoding the α_{1C} Subunit

[0271] 1. Reference List of Partial α_{1C} cDNA Clones

[0272] Numerous α_{1C}-specific cDNA clones were isolated in order to characterize the α_{1C} coding sequence, the α_{1C} initiation of translation, and an alternatively spliced region of α_{1C}. SEQ ID No. 3 sets forth one α_{1C} coding sequence (α_{1C-1}) and deduced amino acid sequence; SEQ ID No. 36 sets forth another splice variant designated α_{1C-2}. SEQ ID No. 4 and No. 5 encode two possible amino terminal ends of an α_{1C} splice variant. SEQ ID No. 6 encodes an alternative exon for the IV S3 transmembrane domain. Other α_{1C} variants can be constructed by selecting the alternative amino terminal ends in place of the ends in SEQ ID No. 3 or 36 and/or inserting the alternative exon (SEQ ID No. 6) in the appropriate location, such as in SEQ ID NO. 3 in place of nucleotides 3904-3987. In addition, the 75 nucleotide sequence (nucleotides 1391-1465 in SEQ ID No. 3) can be deleted or inserted to produce an alternative α_{1C} splice variant.

[0273] Shown below is a list of clones used to characterize the α_{1C} sequence and the nucleotide position of each clone relative to the characterized α_{1C} sequence (SEQ ID No. 3). The isolation and characterization of these cDNA clones are described below (Example II.B.2).

| | | |
|---|---|---|
| IMR32 | 1.66 | nt 1 to 916, SEQ ID No. 3 |
| | | nt 1 to 132, SEQ ID No. 4 |
| IMR32 | 1.157 | nt 1 to 873, SEQ ID No. 3 |
| | | nt 1 to 89, SEQ ID No. 5 |
| IMR32 | 1.67 | n 50 to 1717, SEQ ID No. 3 |
| *IMR32 | 1.86 | nt 1366 to 2583, SEQ ID No. 3 |
| @1.16G | | nt 758 to 867, SEQ ID No. 3 |
| IMR32 | 1.37 | nt 2804 to 5904, SEQ ID No. 3 |
| CNS | 1.30 | nt 2199 to 3903, SEQ ID No. 3 |
| | | nt 1 to 84 of alternative exon, |
| | | SEQ ID No. 6 |
| IMR32 | 1.38 | nt 2448 to 4702, SEQ ID No. 3 |
| | | nt 1 to 84 of alternative exon, |
| | | SEQ ID No. 6 |

*IMR32 1.86 has a 73 nt deletion compared to the rabbit cardiac muscle calcium channel α₁ subunit cDNA sequence.

[0274] 1.16G is an α_{1C} genomic clone.

[0275] 2. Isolation and Characterization of Clones Described in Example II.B.1.

[0276] a. CNS 1.30

[0277] Approximately 1×10⁶ recombinants of the human thalamus cDNA library No. 6 (Example I.B.6.) were screened with fragments of the rabbit skeletal muscle calcium channel α₁ cDNA described in Example II.A.2.a. The hybridization was performed using standard hybridization conditions (Example I.C.) and the filters were washed under low stringency (Example I.C.). Six positive plaques were identified, one of which was CNS 1.30. CNS 1.30 was plaque purified, restriction mapped, subcloned, and characterized by DNA sequencing. CNS 1.30 encodes α_{1C}-specific sequence nt 2199 to 3903 (SEQ ID No. 3) followed by nt 1 to 84 of one of two identified alternative α_{1C} exons (SEQ ID No. 6). 3′ of SEQ ID No. 6, CNS 1.30 contains an intron and, thus, CNS 1.30 encodes a partially spliced α_{1C} transcript.

[0278] b. 1.16G

[0279] Approximately 1×10⁶ recombinants of a λEMBL3-based human genomic DNA library (Cat # HL1006d Clontech Corp., Palo Alto, Calif.) were screened using a rabbit skeletal muscle cDNA fragment (nt −78 to 1006, Example II.A.2.a.). The hybridization was performed using standard hybridization conditions (Example I.C.) and the filters were washed under low stringency (Example I.C.). Fourteen positive plaques were identified, one of which was 1.16G. Clone 1.16G was plaque purified, restriction mapped, subcloned, and portions were characterized by DNA sequencing. DNA sequencing revealed that 1.16G encodes α_{1C}-specific sequence as described in Example II.B.1.

[0280] c. IMR32 1.66 and IMR32 1.67

[0281] Approximately 1×10⁶ recombinants of IMR32 cDNA library #5 (Example I.B.5.) were screened with a 15.1 bp KpnI-SacI fragment of 1.16G (Example II.B.2.b.) encoding α_{1C} sequence (nt 758 to 867, SEQ ID No. 3). The hybridization was performed using standard hybridization conditions (Example I.C.). The filters were then washed in 0.5×SSPE at 65° C. Of the positive plaques, IMR32 1.66 and IMR32 1.67 were identified. The hybridizing plaques were purified, restriction mapped, subcloned, and characterized by DNA sequencing. Two of these cDNA clones, IMR32 1.66 and 1.67, encode α_{1C} subunits as described (Example II.B.1.). In addition, IMR32 1.66 encodes a partially spliced α_{1C} transcript marked by a GT splice donor dinucleotide beginning at the nucleotide 3′ of nt 916 (SEQ ID No. 3). The intron sequence within 1.66 is 101 nt long. IMR32 1.66 encodes the α_{1C} initiation of translation, nt 1 to 3 (SEQ ID No. 3) and 132 nt of 5′ untranslated sequence (SEQ ID No. 4) precede the start codon in IMR32 1.66.

[0282] d. IMR32 1.37 and IMR32 1.38

[0283] Approximately 2×10⁶ recombinants of IMR32 cDNA library #1 (Example I.B.1.) were screened with the CNS 1.30 cDNA fragment (Example II.B.2.a.). The hybridization was performed using low stringency hybridization conditions (Example I.C.) and the filters were washed under low, stringency (Example I.C.). Four positive plaques were identified, plaque purified, restriction mapped, subcloned, and characterized by DNA sequencing. Two of the clones, IMR32 1.37 and IMR32 1.38 encode α_{1C}-specific sequences as described in Example II.B.1.

[0284] DNA sequence comparison of IMR32 1.37 and IMR32 1.38 revealed that the α_{1C} transcript includes two exons that encode the IVS3 transmembrane domain. IMR32 1.37 has a single exon, nt 3904 to 3987 (SEQ ID No. 3) and IMR32 1.38 appears to be anomalously spliced to contain both exons juxtaposed, nt 3904 to 3987 (SEQ ID No. 3) followed by nt 1 to 84 (SEQ ID No. 6). The alternative splice of the α_{1C} transcript to contain either of the two exons encoding the IVS3 region was confirmed by comparing the CNS 1.30 sequence to the IMR32 1.37 sequence. CNS 1.30 contains nt 1 to 84 (SEQ ID No. 6) preceded by the identical sequence contained in IMR32 1.37 for nt 2199 to 3903 (SEQ ID No. 3). As described in Example II.B.2.a., an intron follows nt 1 to 84 (SEQ ID No. 6). Two alternative exons have been spliced adjacent to nt 3903 (SEQ ID No. 3) represented by CNS 1.30 and IMR32 1.37.

[0285] e. IMR32 1.86

[0286] IMR32 cDNA library #1 (Example I.B.1.) was screened in duplicate using oligonucleotide probes 90-9 (nt 1462 to 1491, SEQ ID No. 3) and 90-12 (nt 2496 to 2520, SEQ ID No. 3). These oligonucleotide probes were chosen in order to isolate a clone that encodes the α_{1C} subunit between the 3′ end of IMR32 1.67 (nt 1717, SEQ ID No. 3) and the 5′ end of CNS 1.30 (nt 2199, SEQ ID No. 3). The hybridization conditions were standard hybridization conditions (Example I.C.) with the exception that the 50% deionized formamide was reduced to 20%. The filters were washed under low stringency (Example I.C.). Three positive plaques were identified one of which was IMR32 1.86. IMR32 1.86 was plaque purified, subcloned, and characterized by restriction mapping and DNA sequencing. IMR32 1.86 encodes α_{1C} sequences as described in Example II.B.1. Characterization by DNA sequencing revealed that IMR32 1.86 contains a 73 nt deletion compared to the DNA encoding rabbit cardiac muscle calcium channel α₁ subunit [Mikami et al. (1989) Nature 340:230], nt 2191 to 2263. These missing nucleotides correspond to nt 2176-2248 of SEQ ID No. 3. Because the 5′-end of CNS 1.30 overlaps the 3′-end of IMR32 1.86, some of these missing nucleotides, i.e., nt 2205-2248 of SEQ ID No. 3, are accounted for by CNS 1.30. The remaining missing nucleotides of the 73 nucleotide deletion in IMR32 1.86 (i.e., nt 2176-2204 SEQ ID No. 3) were determined by nucleic acid amplification analysis of dbcAMP-induced IMR32 cell RNA. The 73 nt deletion is a frame-shift mutation and, thus, needs to be corrected. The exact human sequence through this region, (which has been determined by the DNA sequence of CNS 1.30 and nucleic acid amplification analysis of IMR32 cell RNA) can be inserted into IMR32 1.86 by standard methods, e.g., replacement of a restriction fragment or site-directed mutagenesis.

[0287] f. IMR32 1.157

[0288] One million recombinants of IMR32 cDNA library #4 (Example I.B.4.) were screened with an XhoI-EcoRI fragment of IMR32 1.67 encoding α_{1C} nt 50 to 774 (SEQ ID No. 3). The hybridization was performed using standard hybridization conditions (Example I.C.). The filters were washed under high stringency (Example I.C.). One of the positive plaques identified was IMR32 1.157. This plaque was purified, the insert was restriction mapped and subcloned to a standard plasmid vector pGEM7Z (Promega, Madison, Wis.). The DNA was characterized by sequencing. IMR32 1.157 appears to encodes an alternative 5′ portion of the α_{1C} sequence beginning with nt 1 to 89 (SEQ ID No. 5) and followed by nt 1 to 873 (SEQ ID No. 3). Analysis of the 1.66 and 1.157 5′ sequence is described below (Example II.B.3.).

[0289] 3. Characterization of the α_{1C} Initiation of Translation Site

[0290] Portions of the sequences of IMR32 1.157 (nt 57 to 89, SEQ ID No. 5; nt 1 to 67, SEQ ID No. 3), IMR32 1.66 (nt 100 to 132, SEQ ID No. 4; nt 1 to 67, SEQ ID No. 3), were compared to the rabbit lung CaCB-receptor cDNA sequence, nt −33 to 67 [Biel et al. (1990) FEBS Lett. 269:409]. The human sequences are possible alternative 5′ ends of the α_{1C} transcript encoding the region of initiation of translation. IMR32 1.66 closely matches the CaCB receptor cDNA sequence and diverges from the CaCB receptor cDNA sequence in the 5′ direction beginning at nt 122 (SEQ ID No. 4). The start codon identified in the CaCB receptor cDNA sequence is the same start codon used to describe the α_{1C} coding sequence, nt 1 to 3 (SEQ ID No. 3).

[0291] The sequences of α_{1C} splice variants, designated a and α_{1C-2} are set forth in SEQ ID NOs. 3 and 36.

[0292] C. Isolation of Partial cDNA Clones Encoding the α_{1B} Subunit and Construction of a Full-Length Clone

[0293] A human basal ganglia cDNA library was screened with the rabbit skeletal muscle α₁ subunit cDNA fragments (see Example II.A.2.a for description of fragments) under low stringency conditions. One of the hybridizing clones was used to screen an IMR32 cell cDNA library to obtain additional partial α_{1B} cDNA clones, which were in turn used to further screen an IMR32 cell cDNA library for additional partial cDNA clones. One of the partial IMR32 α_{1B} clones was used to screen a human hippocampus library to obtain a partial α_{1B} clone encoding the 3′ end of the α_{1B} coding sequence. The sequence of some of the regions of the partial cDNA clones was compared to the sequence of products of nucleic acid amplification analysis of IMR32 cell RNA to determine the accuracy of the cDNA sequences.

[0294] Nucleic acid amplification analysis of IMR32 cell RNA and genomic DNA using oligonucleotide primers corresponding to sequences located 5′ and 3′ of the STOP codon of the DNA encoding the α_{1B} subunit revealed an alternatively spliced α_{1B}-encoding mRNA in IMR32 cells. This second mRNA product is the result of differential splicing of the α_{1B} subunit transcript to include another exon that is not present in the mRNA corresponding to the other 3′ α_{1B} cDNA sequence that was initially isolated. To distinguish these splice variants of the α_{1B} subunit, the subunit encoded by a DNA sequence corresponding to the form containing the additional exon is referred to as α_{1B-1} (SEQ ID No. 7), whereas the subunit encoded by a DNA sequence corresponding to the form lacking the additional exon is referred to as α_{1B-2} (SEQ ID No. 8). The sequence of α_{1B-1} diverges from that of α_{1B-2} beginning at nt 6633 (SEQ ID No. 7). Following the sequence of the additional exon in α_{1B-1} (nt 6633-6819; SEQ ID No. 7), the α_{1B-1} and α_{1B-2} sequences are identical (i.e., nt 6820-7362 in SEQ ID No. 7 and nt 6633-7175 in SEQ ID No. 8). SEQ ID No. 7 and No. 8 set forth 143 nt of 5′ untranslated sequence (nt 1-143) as well as 202 nt of 3′ untranslated sequence (nt 7161-7362, SEQ ID No. 7) of the DNA encoding α_{1B-1} and 321 nt of 3′ untranslated sequence (nt 6855-7175, SEQ ID No. 8) of the DNA encoding α_{1B-2} Nucleic acid amplification analysis of the IS6 region of the α_{1B} transcript revealed what appear to be additional splice variants based on multiple fragment sizes seen on an ethidium bromide-stained agarose gel containing the products of the amplification reaction.

[0295] A full-length α_{1B-1} cDNA clone designated pcDNA-α_{1B-1} was prepared in an eight-step process as follows.

[0296] STEP 1: The SacI restriction site of pGEM3 (Promega, Madison, Wis.) was destroyed by digestion at the SacI site, producing blunt ends by treatment with T4 DNA polymerase, and relegation. The new vector was designated pGEMΔSac.

[0297] STEP 2: Fragment 1 (HindIII/KpnI; nt 2337 to 4303 of SEQ ID No. 7) was ligated into HindIII/KpnI digested pGEM3ΔSac to produce pα1.177HK.

[0298] STEP 3: Fragment 1 has a 2 nucleotide deletion (nt 3852 and 3853 of SEQ ID No. 7). The deletion was repaired by inserting an amplified fragment (fragment 2) of IMR32 RNA into pα1.177HK. Thus, fragment 2 (NarI/KpnI; nt 3828 to 4303 of SEQ ID No. 7) was inserted into NarI/KpnI digested pα1.177HK replacing the NarI/KpnI portion of fragment 1 and producing pα1.177HK/PCR.

[0299] STEP 4: Fragment 3 (KpnI/KpnI; nt 4303 to 5663 of SEQ ID No. 7) was ligated into KpnI digested pα1.177HK/PCR to produce pα1B5′K.

[0300] STEP 5: Fragment 4 (EcoRI/HindIII; EcoRI adaptor plus nt 1 to 2337 of SEQ ID No. 7) and fragment 5 (HindIII/XhoI fragment of pα1B5′K; nt 2337 to 5446 of SEQ ID No. 7) were ligated together into EcoRI/XhoI digested pcDNA1 (Invitrogen, San Diego, Calif.) to produce pα1B5′.

[0301] STEP 6: Fragment 6 (EcoRI/EcoRI; EcoRI adapters on both ends plus nt 5749 to 7362 of SEQ ID No. 7) was ligated into EcoRI digested pBluescript II KS (Stratagene, La Jolla, Calif.) with the 5′ end of the fragment proximal to the KpnI site in the polylinker to produce pα1.230.

[0302] STEP 7: Fragment 7 (KpnI/XhoI; nt 4303 to 5446 of SEQ ID No. 7), and fragment 8 (XhoI/CspI; nt 5446 to 6259 of SEQ ID No. 7) were ligated into KpnI/CspI digested pα1.230 (removes nt 5749 to 6259 of SEQ ID No. 7 that was encoded in pα1.230 and maintains nt 6259 to 7362 of SEQ ID No. 7) to produce pα1B3′.

[0303] STEP 8: Fragment 9 (SphI/XhoI; nt 4993 to 5446 of SEQ ID No. 7) and fragment 10 (XhoI/XbaI of pα1B3′; nt 5446 to 7319 of SEQ ID No. 7) were ligated into SphI/XbaI digested pα1B5′ (removes nt 4993 to 5446 of SEQ ID No. 7 that were encoded in pα1B5′ and maintains nt 1 to 4850 of SEQ ID No. 7) to produce pcDNAα_{1B-1}.

[0304] The resulting construct, pcDNAα_{1B-1}, contains, in pcDNA1, a full-length coding region encoding α_{1B-1} (nt 144-7362, SEQ ID No. 7), plus 5′ untranslated sequence (nt 1-143, SEQ ID No. 7) and 3′ untranslated sequence (nt 7161-7319, SEQ ID No. 7) under the transcriptional control of the CMV promoter.

[0305] D. Isolation of DNA Encoding Human Calcium Channel α_{1A} Subunits

[0306] 1. Isolation of Partial Clones

[0307] DNA clones encoding portions of human calcium channel α_{1A} subunits were obtained by hybridization screening of human cerebellum cDNA libraries and nucleic acid amplification of human cerebellum RNA. Clones corresponding to the 3′ end of the α_{1A} coding sequence were isolated by screening 1×10⁶ recombinants of a randomly primed cerebellum cDNA library (size-selected for inserts greater than 2.8 kb in length) under low stringency conditions (6×SSPE, 5× Denhart's solution, 0.2% SDS, 200 μg/ml sonicated herring sperm DNA, 42° C.) with oligonucleotide 704 containing nt 6190-6217 of the rat α_{1A} coding sequence [Starr et al. (1992) Proc. Natl. Acad. Sci. U.S.A. 88:5621-5625]. Washes were performed under low stringency conditions. Several clones that hybridized to the probe (clones α1.251-α1.259 and α1.244) were purified and characterized by restriction enzyme mapping and DNA sequence analysis. At least two of the clones, α1.244 and α1.254, contained a translation termination codon. Although clones α1.244 and α1.254 are different lengths, they both contain a sequence of nucleotides that corresponds to the extreme 3′ end of the α_{1A} transcript, i.e., the two clones overlap. These two clones are identical in the region of overlap, except, clone α1.244 contains a sequence of 5 and a sequence of 12 nucleotides that are not present in α1.254.

[0308] To obtain additional α_{1A}-encoding clones, 1×10⁶ recombinants of a randomly primed cerebellum cDNA library (size-selected for inserts ranging from 1.0 to 2.8 kb in length) was screened for hybridization to three oligonucleotides: oligonucleotide 701 (containing nucleotides 2288-2315 of the rat a coding sequence), oligonucleotide 702 (containing nucleotides 3559-3585 of the rat α_{1A} coding sequence) and oligonucleotide 703 (containing nucleotides 4798-4827 of the rat α_{1A} coding sequence). Hybridization and washes were performed using the same conditions as used for the first screening with oligonucleotide 704, except that washes were conducted at 45° C. Twenty clones (clones α1.269-α1.288) hybridized to the probe. Several clones were plaque-purified and characterized by restriction enzyme mapping and DNA sequence analysis. One clone, α1.279, contained a sequence of about 170 nucleotides that is not present in other clones corresponding to the same region of the coding sequence. This region may be present in other splice variants. None of the clones contained a translation initiation codon.

[0309] To obtain clones corresponding to the 5′ end of the human α_{1A} coding sequence, another cerebellum cDNA library was prepared using oligonucleotide 720 (containing nucleotides 2485-2510 of SEQ ID No. 22) to specifically prime first-strand cDNA synthesis. The library (8×10⁵ recombinants) was screened for hybridization to three oligonucleotides: oligonucleotide 701, oligonucleotide 726 (containing nucleotides 2333-2360 of the rat α_{1A} coding sequence) and oligonucleotide 700 (containing nucleotides 767-796 of the rat α_{1A} coding sequence) under low stringency hybridization and washing conditions. Approximately 50 plaques hybridized to the probe. Hybridizing clones α1.381-α1.390 were plaque-purified and characterized by restriction enzyme mapping and DNA sequence analysis. At least one of the clones, α1.381, contained a translation initiation codon.

[0310] Alignment of the sequences of the purified clones revealed that the sequences overlapped to comprise the entire α_{1A} coding sequence. However, not all the overlapping sequences of partial clones contained convenient enzyme restriction sites for use in ligating partial clones to construct a full-length α_{1A} coding sequence. To obtain DNA fragments containing convenient restriction enzyme sites that could be used in constructing a full-length α_{1A} DNA, cDNA was synthesized from RNA isolated from human cerebellum tissue and subjected to nucleic acid amplification. The oligonucleotides used as primers corresponded to human α_{1A} coding sequence located 5′ and 3′ of selected restriction enzyme sites. Thus, in the first amplification reaction, oligonucleotides 753 (containing nucleotides 2368-2391 of SEQ ID No. 22) and 728 (containing nucleotides 3179-3202 of SEQ ID No. 22) were used as the primer pair. To provide a sufficient amount of the desired DNA fragment, the product of this amplification was reamplified using oligonucleotides 753 and 754 (containing nucleotides 3112-3135 of SEQ ID No. 22 as the primer pair. The resulting product was 768 bp in length. In the second amplification reaction, oligonucleotides 719 (containing nucleotides 4950-4975 of SEQ ID No. 22 and 752 (containing nucleotides 5647-5670 of SEQ ID No. 22) were used as the primer pair. To provide a sufficient amount of the desired second DNA fragment, the product of this amplification was reamplified using oligonucleotides 756 (containing nucleotides 5112-5135 of SEQ ID No. 22) and 752 as the primer pair. The resulting product was 559 bp in length.

[0311] 2. Construction of Full-Length α_{1A} Coding Sequences

[0312] Portions of clone α1.381, the 768-bp nucleic acid amplification product, clone α1.278, the 559-bp nucleic acid amplification product, and clone α1.244 were ligated at convenient restriction sites to generate a full-length α_{1A} coding sequence referred to as α_{1A-1}.

[0313] Comparison of the results of sequence analysis of clones α1.244 and α1.254 indicated that the primary transcript of the α_{1A} subunit gene is alternatively spliced to yield at least two variant mRNAs encoding different forms of the α_{1A} subunit. One form, α_{1A-1} is encoded by the sequence shown in SEQ ID No. 22. The sequence encoding a second form, α_{1A-2} differs from the α_{1A-1}-encoding sequence at the 3′ end in that it lacks a 5-nt sequence found in clone α1.244 (nucleotides 7035-7039 of SEQ ID No. 22). This deletion shifts the reading frame and introduces a translation termination codon resulting in an α_{1A-2} coding sequence that encodes a shorter α_{1A} subunit than that encoded by the a splice variant. Consequently, a portion of the 3′ end of the α_{1A-1} coding sequence is actually 3′ untranslated sequence in the α_{1A-2} DNA. The complete sequence of α_{1A-2}, which can be constructed by ligating portions of clone α1.381, the 768-bp nucleic acid amplification product, clone α1.278, the 559-bp nucleic acid amplification product and clone α1.254, is set forth in SEQ ID No. 23.

[0314] E. Isolation of DNA Encoding the α_{1E} Subunit

[0315] DNA encoding α_{1E} subunits of the human calcium channel were isolated from human hippocampus libraries. The selected clones sequenced. DNA sequence analysis of DNA clones encoding the α_{1E} subunit indicated that at least two alternatively spliced forms of the same α_{1E} subunit primary transcript are expressed. One form has the sequence set forth in SEQ ID No. 24 and was designated α_{1E-1} and the other was designated α_{1E-3}, which has the sequence obtained by inserting a 57 base pair fragment between nucleotides 2405 and 2406 of SEQ ID No. 24. The resulting sequence is set forth in SEQ ID No. 25.

[0316] The subunit designated α_{1E-1} has a calculated molecular weight of 254,836 and the subunit designated α_{1E-3} has a calculated molecular weight of 257,348. α_{1E-3} has a 19 amino acid insertion (encoded by SEQ ID No. 25) relative to α_{1E-1} in the region that appears to be the cytoplasmic loop between transmembrane domains IIS6 and IIIS1.

### Example III

[0317] Isolation of cDNA Clones Encoding the Human Neuronal Calcium Channel β₁ Subunit

[0318] A. Isolation of Partial cDNA Clones Encoding the β Subunit and Construction of a Full-Length Clone Encoding the β₁ Subunit

[0319] A human hippocampus cDNA library was screened with the rabbit skeletal muscle calcium channel β₁ subunit cDNA fragment (nt 441 to 1379) [for isolation and sequence of the rabbit skeletal muscle calcium channel β₁ subunit cDNA, see U.S. patent application Ser. No. 482,384 or Ruth et al. (1989) Science 245:1115] using standard hybridization conditions (Example I.C.). A portion of one of the hybridizing clones was used to rescreen the hippocampus library to obtain additional cDNA clones. The cDNA inserts of hybridizing clones were characterized by restriction mapping and DNA sequencing and compared to the rabbit skeletal muscle calcium channel β₁ subunit cDNA sequence.

[0320] Portions of the partial β₁ subunit cDNA clones were ligated to generate a full-length clone encoding the entire β₁ subunit. SEQ ID No. 9 shows the β₁ subunit coding sequence (nt 1-1434) as well as a portion of the 3′ untranslated sequence (nt 1435-1546). The deduced amino acid sequence is also provided in SEQ ID No. 9. In order to perform expression experiments, full-length β₁ subunit cDNA clones were constructed as follows.

[0321] Step 1: DNA fragment 1 (˜800 bp of 5′ untranslated sequence plus nt 1-277 of SEQ ID No. 9) was ligated to DNA fragment 2 (nt 277-1546 of SEQ ID No. 9 plus 448 bp of intron sequence) and cloned into pGEM7Z. The resulting plasmid, pβ1-1.18, contained a full-length β₁ subunit clone that included a 448-bp intron.

[0322] Step 2: To replace the 5′ untranslated sequence of pβ1-1.18 with a ribosome binding site, a double-stranded adapter was synthesized that contains an EcoRI site, sequence encoding a ribosome binding site (5′-ACCACC-3′) and nt 1-25 of SEQ ID No. 9. The adapter was ligated to SmaI-digested pβ1-1.18, and the products of the ligation reaction were digested with EcoRI.

[0323] Step 3: The EcoRI fragment from step 2 containing the EcoRI adapter, efficient ribosome binding site and nt 1-1546 of SEQ ID No. 9 plus intron sequence was cloned into a plasmid vector and designated pβ1-1.18RBS. The EcoRI fragment of pβ1-1.18RBS was subcloned into EcoRI-digested pcDNA1 with the initiation codon proximal to CMV promoter to form pHBCaCHβ₁ₐRBS(A).

[0324] Step 4: To generate a full-length clone encoding the β₁ subunit lacking intron sequence, DNA fragment 3 (nt 69-1146 of SEQ ID No. 9 plus 448 bp of intron sequence followed by nt 1147-1546 of SEQ ID No. 9), was subjected to site-directed mutagenesis to delete the intron sequence, thereby yielding pang). The EcoRI-XhoI fragment of pβ1-1.18RBS (containing of the ribosome binding site and nt 1-277 of SEQ ID No. 9) was ligated to the XhoI-EcoRI fragment of pβ1(−) (containing of nt 277-1546 of SEQ ID No. 9) and cloned into pcDNA1 with the initiation of translation proximal to the CMV promoter. The resulting expression plasmid was designated pHBCaCHβ_{1b}RBS(A).

[0325] B. Splice Variant β₁₋₃

[0326] DNA sequence analysis of the DNA clones encoding the β₁ subunit indicated that in the CNS at least two alternatively spliced forms of the same human β₁ subunit primary transcript are expressed. One form is represented by the sequence shown in SEQ ID No. 9 and is referred to as β₁₋₂. The sequences of β₁₋₂ and the alternative form, β₁₋₃, diverge at nt 1334 (SEQ ID No. 9). The complete β₁₋₃ sequence (nt 1-1851), including 3′ untranslated sequence (nt 1795-1851), is set forth in SEQ ID No. 10.

### Example IV

[0327] Isolation of cDNA Clones Encoding the Human Neuronal Calcium Channel α₂-Subunit

[0328] A. Isolation of cDNA Clones

[0329] The complete human neuronal α₂ coding sequence (nt 35-3310) plus a portion of the 5′ untranslated sequence (nt 1 to 34) as well as a portion of the 3′ untranslated sequence (nt 3311-3600) is set forth in SEQ ID No. 11.

[0330] To isolate DNA encoding the human neuronal α₂ subunit, human α₂ genomic clones first were isolated by probing human genomic Southern blots using a rabbit skeletal muscle calcium channel α₂ subunit cDNA fragment [nt 43 to 272, Ellis et al. (1988) Science 240:1661]. Human genomic DNA was digested with EcoRI, electrophoresed, blotted, and probed with the rabbit skeletal muscle probe using standard hybridization conditions (Example I.C.) and low stringency washing conditions (Example I.C.). Two restriction fragments were identified, 3.5 kb and 3.0 kb. These EcoRI restriction fragments were cloned by preparing a λgt11 library containing human genomic EcoRI fragments ranging from 2.2 kb to 4.3 kb. The library was screened as described above using the rabbit α₂ probe, hybridizing clones were isolated and characterized by DNA sequencing. HGCaCHα2.20 contained the 3.5 kb fragment and HGCaCHα2.9 contained the 3.0 kb fragment.

[0331] Restriction mapping and DNA sequencing revealed that HGCaCHα2.20 contains an 82 bp exon (nt 130 to 211 of the human α₂ coding sequence, SEQ ID No. 11) on a 650 bp PstI-XbaI restriction fragment and that HGCaCHα2.9 contains 105 bp of an exon (nt 212 to 316 of the coding sequence, SEQ ID No. 11) on a 750 bp XbaI-BglII restriction fragment. These restriction fragments were used to screen the human basal ganglia cDNA library (Example II.C.2.a.). HBCaCHα2.1 was isolated (nt 29 to 1163, SEQ ID No. 11) and used to screen a human brain stem cDNA library (ATCC Accession No. 37432) obtained from the American Type Culture Collection, 12301 Parklawn Drive, Rockville, Md. 20852. Two clones were isolated, HBCaCHα2.5 (nt 1 to 1162, SEQ ID No. 11) and HBCaCHα2.8 (nt 714 to 1562, SEQ ID No. 11, followed by 1600 nt of intervening sequence). A 2400 bp fragment of HBCaCHα2.8 (beginning at nt 759 of SEQ ID No. 11 and ending at a SmaI site in the intron) was used to rescreen the brain stem library and to isolate HBCaCHα2.11 (nt 879 to 3600, SEQ ID No. 11). Clones HBCaCHα2.5 and HBCaCHα2.11 overlap to encode an entire human brain α₂ protein.

[0332] B. Construction of pHBCaCHα₂A

[0333] To construct pHBCaCHα₂A containing DNA encoding a full-length human calcium-channel α₂ subunit, an (EcoRI)-PvuI fragment of HBCaCHα2.5 (nt 1 to 1061, SEQ ID No. 11, EcoRI adapter, PvuII partial digest) and a PvuII-PstI fragment of HBCaCHα2.11 (nt 1061 to 2424 SEQ ID No. 11; PvuII partial digest) were ligated into EcoRI-PstI-digested pIBI24 (Stratagene, La Jolla, Calif.). Subsequently, an (EcoRI)-PstI fragment (nt 1 to 2424 SEQ ID No. 11) was isolated and ligated to a PstI-(EcoRI) fragment (nt 2424 to 3600 SEQ ID No. 11) of HBCaCHα2.11 in EcoRI-digested pIBI24 to produce DNA, HBCaCHα2, encoding a full-length human brain α₂ subunit. The 3600 bp EcoRI insert of HBCaCHα2 (nt 1 to 3600, SEQ ID No. 11) was subcloned into pcDNA1 (pHBCaCHα2A) with the methionine initiating codon proximal to the CMV promoter. The 3600 bp EcoRI insert of HBCaCHα2 was also subcloned into pSV2dHFR [Subramani et al. (1981). Mol. Cell. Biol. 1:854-864] which contains the SV40 early promoter, mouse dihydrofolate reductase (dhfr) gene, SV40 polyadenylation and splice sites and sequences required for maintenance of the vector in bacteria.

### Example V

[0334] Differential Processing of the Human β₁ Transcript and the Human α₂ Transcript

[0335] A. Differential Processing of the β₁ Transcript

[0336] Nucleic acid amplification analysis of the human transcript present in skeletal muscle, aorta, hippocampus and basal ganglia, and HEK 293 cells revealed differential processing of the region corresponding to nt 615-781 of SEQ ID No. 9 in each of the tissues. Four different sequences that result in five different processed β₁ transcripts through this region were identified. The β₁ transcripts from the different tissues contained different combinations of the four sequences, except for one of the β₁ transcripts expressed in HEK 293 cells (β₁₋₅) which lacked all four sequences.

[0337] None of the β₁ transcripts contained each of the four sequences; however, for ease of reference, all four sequences are set forth end-to-end as a single long sequence in SEQ ID No. 12. The four sequences that are differentially processed are sequence 1 (nt 14-34 in SEQ ID No. 12), sequence 2 (nt 35-55 in SEQ ID No. 12), sequence 3 (nt 56-190 in SEQ ID No. 12) and sequence 4 (nt 191-271 in SEQ ID No. 12). The forms of the β₁ transcript that have been identified include: (1) a form that lacks sequence 1 called β₁₋₁ (expressed in skeletal muscle), (2) a form that lacks sequences 2 and 3 called β₁₋₂ (expressed in CNS), (3) a form that lacks sequences 1, 2 and 3 called β₁₋₄ (expressed in aorta and HEK cells) and (4) a form that lacks sequences 1-4 called β₁₋₅ (expressed in HEK cells). Additionally, the β₁₋₄ and β₁₋₅ contain a guanine nucleotide (nt 13 in SEQ ID No. 12) that is absent in the β₁₋₁ and β₁₋₂ forms. The sequences of β₁ splice variants are set forth in SEQ ID Nos. 9, 10 and 33-35.

[0338] B. Differential Processing of Transcripts Encoding the α₂ Subunit

[0339] The complete human neuronal α₂ coding sequence (nt 35-3307) plus a portion of the 5′ untranslated sequence (nt 1 to 34) as well as a portion of the 3′ untranslated sequence (nt 3308-3600) is set forth as SEQ ID No. 11.

[0340] Nucleic acid amplification analysis of the human α₂ transcript present in skeletal muscle, aorta, and CNS revealed differential processing of the region corresponding to nt 1595-1942 of SEQ ID No. 11 in each of the tissues.

[0341] The analysis indicated that the primary transcript of the genomic DNA that includes the nucleotides corresponding to nt 1595-1942 also includes an additional sequence (SEQ ID No. 13: 5′ CCTATTGGTGTAGGTATACCAACAATTAATTT AAGAAAAAGGAGACCCAATATCCAG 3′) inserted between nt 1624 and 1625 of SEQ ID No. 11. Five alternatively spliced variant transcripts that differ in the presence or absence of one to three different portions of the region of the primary transcript that includes the region of nt 1595-1942 of SEQ ID No. 11 plus SEQ ID No. 13 inserted between nt 1624 and 1625 have been identified. The five α₂-encoding transcripts from the different tissues include different combinations of the three sequences, except for one of the α₂ transcripts expressed in aorta which lacks all three sequences. None of the α₂ transcripts contained each of the three sequences. The sequences of the three regions that are differentially processed are sequence 1 (SEQ ID No. 13), sequence 2 ( 5′ AACCCCAAATCTCAG 3′, which is nt 1625-1639 of SEQ ID No. 11), and sequence 3 (5′ CAAAAAAGGGCAAAATGAAGG 3′, which is nt 1908-1928 of SEQ ID No. 11). The five α₂ forms identified are (1) a form that lacks sequence 3 called α₂ₐ (expressed in skeletal muscle), (2) a form that lacks sequence 1 called α_{2b} (expressed in CNS), (3) a form that lacks sequences 1 and 2 called α_{2c} expressed in aorta), (4) a form that lacks sequences 1, 2 and 3 called α_{2d} (expressed in aorta) and (5) a form that lacks sequences 1 and 3 called α₂ₑ (expressed in aorta).

[0342] The sequences of α₂ₐ-α₂ₑ are set forth in SEQ ID Nos. 11 (α_{2b}) 29 (α₂ₐ) and 30-32 (α_{2c}-α₂ₑ, respectively), respectively.

### Example VI

[0343] Isolation of DNA Encoding a Calcium Channel γ0 Subunit from a Human Brain cDNA Library

[0344] A. Isolation of DNA Encoding the γ Subunit

[0345] Approximately 1×10⁶ recombinants from a λgt11-based human hippocampus cDNA library (Clontech catalog #HL1088b, Palo Alto, Calif.) were screened by hybridization to a 484 bp sequence of the rabbit skeletal muscle calcium channel γ subunit cDNA (nucleotides 621-626 of the coding sequence plus 438 nucleotides of 3′-untranslated sequence) contained in vector γJ10 [Jay, S. et al. (1990). Science 248:490-492]. Hybridization was performed using moderate stringency conditions (20% deionized formamide, 5× Denhardt's, 6×SSPE, 0.2% SDS, 20 μg/ml herring sperm DNA, 42° C.) and the filters were washed under low stringency (see Example I.C.). A. plaque that hybridized to this probe was purified and insert DNA was subcloned into pGEM7Z. This cDNA insert was designated γ1.4.

[0346] B. Characterization of γ1.4

[0347] γ1.4 was confirmed by DNA hybridization and characterized by DNA sequencing. The 1500 bp SstI fragment of γ1.4 hybridized to the rabbit skeletal muscle calcium channel γ subunit cDNA γJ10 on a Southern blot. SEQ analysis of this fragment revealed that it contains of approximately 500 nt of human DNA sequence and ˜1000 nt of λgt11 sequence (included due to apparent destruction of one of the EcoRI cloning sites in λgt11). The human DNA sequence contains of 129 nt of coding sequence followed immediately by a translational STOP codon and 3′ untranslated sequence (SEQ ID No. 14).

[0348] To isolate the remaining 5′ sequence of the human γ subunit cDNA, human CNS cDNA libraries and/or preparations of mRNA from human CNS tissues can first be assayed by nucleic acid amplification analysis methods using oligonucleotide primers based on the γ cDNA-specific sequence of γ1.4. Additional human neuronal γ subunit-encoding DNA can be isolated from cDNA libraries that, based on the results of the nucleic acid amplification analysis assay, contain γ-specific amplifiable cDNA. Alternatively, cDNA libraries can be constructed from mRNA preparations that, based on the results of the nucleic acid amplification analysis assays, contain γ-specific amplifiable transcripts. Such libraries are constructed by standard methods using oligo dT to prime first-strand cDNA synthesis from poly A⁺ RNA, (see Example I.B.). Alternatively, first-strand cDNA can be specified by priming first-strand cDNA synthesis with a γ cDNA-specific oligonucleotide based on the human DNA sequence in γ1.4. A cDNA library can then be constructed based on this first-strand synthesis and screened with the γ-specific portion of γ1.4.

### Example VII

[0349] Isolation of cDNA Clones Encoding the Human Calcium Channel β₂ Subunit

[0350] Sequencing of clones isolated as described in Example III revealed a clone encoding a human neuronal calcium channel β₂ subunit (designated β_{2D} see, SEQ ID No. 26). An oligonucleotide based on the 5′ end of this clone was used to prime a human hippocampus cDNA library. The library was screened with this β₂ clone under conditions of low to medium stringency (final wash 0.5×SSPE, 50° C.). Several hybridizing clones were isolated and sequenced. Among these clones were those that encode β_{2C}, β_{2D} and β_{2E}. For example, the sequence of β_{2C} is set forth in SEQ ID NO. 37, and the sequence of β_{2E} is set forth in SEQ ID No. 38.

[0351] A randomly primed hippocampus library was then screened using a combination of the clone encoding β_{2D} and a portion of the β₃ clone deposited under ATCC Accession No. 69048. Multiple hybridizing clones were isolated. Among these were clones designated β101, β102 and β104. β101 appears to encodes the 5′ end of a splice variant of β₂, designated β_{2E β}102 and β104 encode portions of the 3′ end of β₂.

[0352] It appears that the β₂ splice variants include nucleotides 182-2294 of SEQ ID No. 26 and differ only between the start codon and nucleotides that correspond to 212 of SEQ. ID No. 26.

### Example VIII

[0353] Isolation of cDNA Clones Encoding Human Calcium Channel β₄ and β₃ Subunits

[0354] A. Isolation of cDNA Clones Encoding a Human β₄ Subunit

[0355] A clone containing a translation initiation codon and approximately 60% of the β₄ coding sequence was obtained from a human cerebellum cDNA library (see nucleotides 1-894 of Sequence ID No. 27). To obtain DNA encoding the remaining 3′ portion of the β₄ coding sequence, a human cerebellum cDNA library was screened for hybridization a nucleic acid amplification product under high stringency hybridization and wash conditions. Hybridizing clones are purified and characterized by restriction enzyme mapping and DNA sequence analysis to identify those that contain sequence corresponding to the 3′ end of the β₄ subunit coding sequence and a termination codon. Selected clones are ligated to the clone containing the 5′ half of the β₄ coding sequence at convenient restriction sites to generate a full-length cDNA encoding a subunit. The sequence of a full-length β₄ clone is set forth in SEQ ID No. 27; the amino acid sequence is set forth in SEQ ID No. 28.

[0356] B. Isolation of cDNA Clones Encoding a Human β₃ Subunit

[0357] Sequencing of clones isolated as described in Example III also revealed a clone encoding a human neuronal calcium channel β₃ subunit. This clone has been deposited as plasmid β1.42 (ATCC Accession No. 69048).

[0358] To isolate a full-length cDNA clone encoding a complete β₃ subunit, a human hippocampus cDNA library (Stratagene, La Jolla, Calif.) was screened for hybridization to a 5′ EcoRI-PstI fragment of the cDNA encoding β₁₋₂ using lower stringency hybridization conditions (20% deionized formamide, 200 μg/ml sonicated herring sperm DNA, 5×SSPE, 5× Denhardt's solution, 42° C.) and wash conditions. One of the hybridizing clones contained both translation initiation and termination codons and encodes a complete β₃ subunit designated β₃₋₁ (Sequence ID No. 19). In vitro transcripts of the cDNA were prepared and injected into Xenopus oöcytes along with transcripts of the α_{1B-1} and α_{2b} cDNAs using methods similar to those described in Example IX.D. Two-electrode voltage clamp recordings of the oöcytes revealed significant voltage-dependent inward Ba²⁺ currents.

[0359] An additional β₃ subunit-encoding clone, designated β₃₋₂, was obtained by screening a human cerebellum cDNA library for hybridization to the nucleic acid amplification product referred to in Example VIII.A. under lower stringency (20% deionized formamide, 200 μg/ml sonicated herring sperm DNA, 5×SSPE, 5× Denhardt's solution, 42° C.) hybridization and wash conditions. The 5′ ends of this clone (Sequence ID No. 20, β₃₋₂) and the first β₃ subunit, designated β₃₋₁, (Sequence ID No. 19) differ at their 5′ ends and are splice variants of the β₃ gene.

### Example IX

[0360] Recombinant Expression of Human Neuronal Calcium Channel Subunit-Encoding cDNA and RNA Transcripts in Mammalian Cells

[0361] A. Recombinant Expression of the Human Neuronal Calcium Channel α₂ Subunit cDNA in DG44 Cells

[0362] 1. Stable Transfection of DG44 Cells

[0363] DG44 cells [dhfr⁻ Chinese hamster ovary cells; see, e.g., Urlaub, G. et al. (1986) Som. Cell Molec. Genet. 12:555-566] obtained from Lawrence Chasin at Columbia University were stably transfected by CaPO₄ precipitation methods [Wigler et al. (1979) Proc. Natl. Acad. Sci. USA 76:1373-1376] with pSV2dhfr vector containing the human neuronal calcium channel α₂-subunit cDNA (see Example IV) for polycistronic expression/selection in transfected cells. Transfectants were grown on 10% DMEM medium without hypoxanthine or thymidine in order to select cells that had incorporated the expression vector. Twelve transfectant cell lines were established as indicated by their ability to survive on this medium.

[0364] 2. Analysis of α₂ Subunit cDNA Expression in Transfected DG44 Cells

[0365] Total RNA was extracted according to the method of Birnboim [(1988) Nuc. Acids Res. 16:1487-1497] from four of the DG44 cell lines that had been stably transfected with pSV2dhfr containing the human neuronal calcium channel α₂ subunit cDNA. RNA (˜15 μg per lane) was separated on a 1% agarose formaldehyde gel, transferred to nitrocellulose and hybridized to the random-primed human neuronal calcium channel α₂ cDNA (hybridization: 50% formamide, 5×SSPE, 5× Denhardt's, 42° C.; wash: 0.2×SSPE, 0.1% SDS, 65° C.) Northern blot analysis of total RNA from four of the DG44 cell lines that had been stably transfected with pSV2dhfr containing the human neuronal calcium channel α₂ subunit cDNA revealed that one of the four cell lines contained hybridizing mRNA the size expected for the transcript of the α₂ subunit cDNA (5000 nt based on the size of the cDNA) when grown in the presence of 10 mM sodium butyrate for two days. Butyrate nonspecifically induces transcription and is often used for inducing the SV40 early promoter [Gorman, C. and Howard, B. (1983) Nucleic Acids Res. 11:1631]. This cell line, 44α₂-9, also produced mRNA species smaller (several species) and larger (6800 nt) than the size expected for the transcript of the α₂ cDNA (5000 nt) that hybridized to the α₂ cDNA-based probe. The 5000- and 6800-nt transcripts produced by this transfectant should contain the entire α₂ subunit coding sequence and therefore should yield a full-length α₂ subunit protein. A weakly hybridizing 8000-nucleotide transcript was present in untransfected and transfected DG44 cells. Apparently, DG44 cells transcribe a calcium channel α₂ subunit or similar gene at low levels. The level of expression of this endogenous α₂ subunit transcript did not appear to be affected by exposing the cells to butyrate before isolation of RNA for northern analysis.

[0366] Total protein was extracted from three of the DG44 cell lines that had been stably transfected with pSV2dhfr containing the human neuronal calcium channel α₂ subunit cDNA. Approximately 10⁷ cells were sonicated in 300 μl of a solution containing 50 mM HEPES, 1 mM EDTA, 1 mM PMSF. An equal volume of 2× loading dye [Laemmli, U. K. (1970). Nature 227:680] was added to the samples and the protein was subjected to electrophoresis on an 8% polyacrylamide gel and then electrotransferred to nitrocellulose. The nitrocellulose was incubated with polyclonal guinea pig antisera (1:200 dilution) directed against the rabbit skeletal muscle calcium channel α₂ subunit (obtained from K. Campbell, University of Iowa) followed by incubation with [¹²⁵I]-protein A. The blot was exposed to X-ray film at −70° C. Reduced samples of protein from the transfected cells as well as from untransfected DG44 cells contained immunoreactive protein of the size expected for the α₂ subunit of the human neuronal calcium channel (130-150 kDa). The level of this immunoreactive protein was higher in 44α₂-9 cells that had been grown in the presence of 10 mM sodium butyrate than in 44α₂-9 cells that were grown in the absence of sodium butyrate. These data correlate well with those obtained in northern analyses of total RNA from 44α₂-9 and untransfected DG44 cells. Cell line 44α₂-9 also produced a 110 kD immunoreactive protein that may be either a product of proteolytic degradation of the full-length α₂ subunit or a product of translation of one of the shorter (<5000 nt) mRNAs produced in this cell line that hybridized to the α₂ subunit cDNA probe.

[0367] B. Expression of DNA Encoding Human Neuronal Calcium Channel α₁, α₂ and β₁ Subunits in HEK Cells

[0368] Human embryonic kidney cells (HEK 293 cells) were transiently and stably transfected with human neuronal DNA encoding calcium channel subunits. Individual transfectants were analyzed electrophysiologically for the presence of voltage-activated barium currents and functional recombinant voltage-dependent calcium channels were.

[0369] 1. Transfection of HEK 293 Cells

[0370] Separate expression vectors containing DNA encoding human neuronal calcium channel α_{1D}, α₂ and β₁ subunits, plasmids pVDCCIII(A), pHBCaCHα₂A, and pHBCaCHβ₁ₐRBS(A), respectively, were constructed as described in Examples II.A.3, IV.B. and III.B.3., respectively. These three vectors were used to transiently co-transfect HEK 293 cells. For stable transfection of HEK 293 cells, vector pHBCaCHβ_{1b}RBS(A) (Example III.B.3.) was used in place of pHBCaCHβ₁ₐRBS(A) to introduce the DNA encoding the β₁ subunit into the cells along with pVDCCIII(A) and pHBCaCHα₂A.

[0371] a. Transient Transfection

[0372] Expression vectors pVDCCIII(A), pHBCaCHα₂A and pHBCaCHβ₁ₐRBS(A) were used in two sets of transient transfections of HEK 293 cells (ATCC Accession No. CRL1573). In one transfection procedure, HEK 293 cells were transiently cotransfected with the α₁ subunit cDNA expression plasmid, the α₂ subunit cDNA expression plasmid, the β₁ subunit cDNA expression plasmid and plasmid pCMVβgal (Clontech Laboratories, Palo Alto, Calif.). Plasmid pCMVβgal contains the lacZ gene (encoding E. coli β-galactosidase) fused to the cytomegalovirus (CMV) promoter and was included in this transfection as a marker gene for monitoring the efficiency of transfection. In the other transfection procedure, HEK 293 cells were transiently co-transfected with the α₁ subunit cDNA expression plasmid pVDCCIII(A) and pCMVβgal. In both transfections, 2-4×10⁶ HEK 293 cells in a 10-cm tissue culture plate were transiently co-transfected with 5 μg of each of the plasmids included in the experiment according to standard CaPO₄ precipitation transfection procedures (Wigler et al. (1979) Proc. Natl. Acad,. Sci. USA 76:1373-1376). The transfectants were analyzed for β-galactosidase expression by direct staining of the product of a reaction involving β-galactosidase and the X-gal substrate [Jones, J. R. (1986) EMBO 5:3133-3142] and by measurement of β-galactosidase activity [Miller, J. H. (1972) Experiments in Molecular Genetics, pp. 352-355, Cold Spring Harbor Press]. To evaluate subunit cDNA expression in these transfectants, the cells were analyzed for subunit transcript production (northern analysis), subunit protein production (immunoblot analysis of cell lysates) and functional calcium channel expression (electrophysiological analysis).

[0373] b. Stable Transfection

[0374] HEK 293 cells were transfected using the calcium phosphate transfection procedure [Current Protocols in Molecular Biology, Vol. 1, Wiley Inter-Science, Supplement 14, Unit 9.1.1-9.1.9 (1990)]. Ten-cm plates, each containing one-to-two million HEK 293 cells, were transfected with 1 ml of DNA/calcium phosphate precipitate containing 5 μg PVDCCIII(A), 5 μg pHBCaCHα₂A, 5 μg pHBCaCHβ_{1b}RBS(A), 5 μg pCMVβgal and 1 βg pSV2neo (as a selectable marker). After 10-20 days of growth in media containing 500 μg G418, colonies had formed and were isolated using cloning cylinders.

[0375] 2. Analysis of HEK 293 Cells Transiently Transfected with DNA Encoding Human Neuronal Calcium Channel Subunits

[0376] a. Analysis of β-Galactosidase Expression

[0377] Transient transfectants were assayed for β-galactosidase expression by β-galactosidase activity assays (Miller, J. H., (1972) Experiments in Molecular Genetics, pp. 352-355, Cold Spring Harbor Press) of cell lysates (prepared as described in Example VII.A.2) and staining of fixed cells (Jones, J. R. (1986) EMBO 5:3133-3142). The results of these assays indicated that approximately 30% of the HEK 293 cells had been transfected.

[0378] b. Northern Analysis

[0379] PolyA+ RNA was isolated using the Invitrogen Fast Trak Kit (Invitrogen, San Diego, Calif.) from HEK 293 cells transiently transfected with DNA encoding each of the α₁, α₂ and β₁ subunits and the lacZ gene or the α₁ subunit and the lacZ gene. The RNA was subjected to electrophoresis on an agarose gel and transferred to nitrocellulose. The nitrocellulose was then hybridized with one or more of the following radiolabeled probes: the lacZ gene, human neuronal calcium channel α_{1D} subunit-encoding cDNA, human neuronal calcium channel α₂ subunit-encoding cDNA or human neuronal calcium channel β₁ subunit-encoding cDNA. Two transcripts that hybridized with the α₁ subunit-encoding cDNA were detected in HEK 293 cells transfected with the DNA encoding the α₁, α₂, and β₁ subunits and the lacZ gene as well as in HEK 293 cells transfected with the α₁ subunit cDNA and the lacZ gene. One mRNA species was the size expected for the transcript of the α₁ subunit cDNA (8000 nucleotides). The second RNA species was smaller (4000 nucleotides) than the size expected for this transcript. RNA of the size expected for the transcript of the lacZ gene was detected in cells transfected with the α₁, α₂ and β₁ subunit-encoding cDNA and the lacZ gene and in cells transfected with the α₁ subunit cDNA and the lacZ gene by hybridization to the lacZ gene sequence.

[0380] RNA from cells transfected with the α₁, α₂ and β₁ subunit-encoding cDNA and the lacZ gene was also hybridized with the α₂ and β₁ subunit cDNA probes. Two mRNA species hybridized to the α₂ subunit cDNA probe. One species was the size expected for the transcript of the α₂ subunit cDNA (4000 nucleotides). The other species was larger (6000 nucleotides) than the expected size of this transcript. Multiple RNA species in the cells co-transfected with α₁, α₂ and β₁ subunit-encoding cDNA and the lacZ gene hybridized to the β₁ subunit cDNA probe. Multiple β subunit transcripts of varying sizes were produced since the β subunit cDNA expression vector contains two potential polyA⁺ addition sites.

[0381] c. Electrophysiological Analysis

[0382] Individual transiently transfected HEK 293 cells were assayed for the presence of voltage-dependent barium currents using the whole-cell variant of the patch clamp technique [Hamill et al. (1981). Pflugers Arch. 391:85-100]. HEK 293 cells transiently transfected with pCMVβgal only were assayed for barium currents as a negative control in these experiments. The cells were placed in a bathing solution that contained barium ions to serve as the current carrier. Choline chloride, instead of NaCl or KCl, was used as the major salt component of the bath solution to eliminate currents through sodium and potassium channels. The bathing solution contained 1 mM MgCl₂ and was buffered at pH 7.3 with 10 mM HEPES (pH adjusted with sodium or tetraethylammonium hydroxide). Patch pipettes were filled with a solution containing 135 mM CsCl, 1 mM MgCl₂, 10 mM glucose, 10 mM EGTA, 4 mM ATP and 10 mM HEPES (pH adjusted to 7.3 with tetraethylammonium hydroxide). Cesium and tetraethylammonium ions block most types of potassium channels. Pipettes were coated with Sylgard (Dow-Corning, Midland, Mich.) and had resistances of 1-4 megohm. Currents were measured through a 500 megohm headstage resistor with the Axopatch IC (Axon Instruments, Foster City, Calif.) amplifier, interfaced with a Labmaster (Scientific Solutions, Solon, Ohio) data acquisition board in an IBM-compatible PC. pClamp (Axon Instruments) was used to generate voltage commands and acquire data. Data were analyzed with pClamp or Quattro Professional (Borland International, Scotts Valley, Calif.) programs.

[0383] To apply drugs, “puffer” pipettes positioned within several micrometers of the cell under study were used to apply solutions by pressure application. The drugs used for pharmacological characterization were dissolved in a solution identical to the bathing solution. Samples of a 10 mM stock solution of Bay K 8644 (RBI, Natick, Mass.), which was prepared in DMSO, were diluted to a final concentration of 1 μM in 15 mM Ba²⁺-containing bath solution before they were applied.

[0384] Twenty-one negative control HEK 293 cells (transiently transfected with the lacZ gene expression vector pCMVβgal only) were analyzed by the whole-cell variant of the patch clamp method for recording currents. Only one cell displayed a discernible inward barium current; this current was not affected by the presence of 1 μM Bay K 8644. In addition, application of Bay K 8644 to four cells that did not display Ba²⁺ currents did not result in the appearance of any currents.

[0385] Two days after transient transfection of HEK 293 cells with α₁, α₂ and β₁ subunit-encoding cDNA and the lacZ gene, individual transfectants were assayed for voltage-dependent barium currents. The currents in nine transfectants were recorded. Because the efficiency of transfection of one cell can vary from the efficiency of transfection of another cell, the degree of expression of heterologous proteins in individual transfectants varies and some cells do not incorporate or express the foreign DNA. Inward barium currents were detected in two of these nine transfectants. In these assays, the holding potential of the membrane was −90 mV. The membrane was depolarized in a series of voltage steps to different test potentials and the current in the presence and absence of 1 μM Bay K 8644 was recorded. The inward barium current was significantly enhanced in magnitude by the addition of Bay K 8644. The largest inward barium current (˜160 pA) was recorded when the membrane was depolarized to 0 mV in the presence of 1 μM Bay K 8644. A comparison of the I-V curves, generated by plotting the largest current recorded after each depolarization versus the depolarization voltage, corresponding to recordings conducted in the absence and presence of Bay K 8644 illustrated the enhancement of the voltage-activated current in the presence of Bay K 8644.

[0386] Pronounced tail currents were detected in the tracings of currents generated in the presence of Bay K 8644 in HEK 293 cells transfected with α₁, α₂ and β₁ subunit-encoding cDNA and the lacZ gene, indicating that the recombinant calcium channels responsible for the voltage-activated barium currents recorded in this transfected appear to be DHP-sensitive.

[0387] The second of the two transfected cells that displayed inward barium currents expressed a ˜50 pA current when the membrane was depolarized from ˜90 mV. This current was nearly completely blocked by 200 μM cadmium, an established calcium channel blocker.

[0388] Ten cells that were transiently transfected with the DNA encoding the α₁ subunit and the lacZ gene were analyzed by whole-cell patch clamp methods two days after transfection. One of these cells displayed a 30 pA inward barium current. This current amplified 2-fold in the presence of 1 μM Bay K 8644. Furthermore, small tail currents were detected in the presence of Bay K 8644. These data indicate that expression of the human neuronal calcium channel α_{1D} subunit-encoding cDNA in HEK 293 yields a functional DHP-sensitive calcium channel.

[0389] 3. Analysis of HEK 293 Cells Stably Transfected with DNA Encoding Human Neuronal Calcium Channel Subunits

[0390] Individual stably transfected HEK 293 cells were assayed electrophysiologically for the presence of voltage-dependent barium currents as described for electrophysiological analysis of transiently transfected HEK 293 cells (see Example VII.B.2.c). In an effort to maximize calcium channel activity via cyclic-AMP-dependent kinase-mediated phosphorylation [Pelzer, et al. (1990) Rev. Physiol. Biochem. Pharmacol. 114:107-207], cAMP (Na salt, 250 μM) was added to the pipette solution and forskolin (10 μM) was added to the bath solution in some of the recordings. Qualitatively similar results were obtained whether these compounds were present or not.

[0391] Barium currents were recorded from stably transfected cells in the absence and presence of Bay K 8644 (1 μM) When the cell was depolarized to −10 mV from a holding potential of −90 mV in the absence of Bay K 8644, a current of approximately 35 pA with a rapidly deactivating tail current was recorded. During application of Bay K 8644, an identical depolarizing protocol elicited a current of approximately 75 pA, accompanied by an augmented and. prolonged tail current. The peak magnitude of currents recorded from this same cell as a function of a series of depolarizing voltages were assessed. The responses in the presence of Bay K 8644 not only increased, but the entire current-voltage relation shifted about −10 mV. Thus, three typical hallmarks of Bay K 8644 action, namely increased current magnitude, prolonged tail currents, and negatively shifted activation voltage, were observed, clearly indicating the expression of a DHP-sensitive calcium channel in these stably transfected cells. No such effects of Bay K 8644 were observed in untransfected HEK 293 cells, either with or without cAMP or forskolin.

[0392] C. Use of pCMV-Based Vectors and pcDNA1-Based Vectors for Expression of DNA Encoding Human Neuronal Calcium Channel Subunits

[0393] 1. Preparation of Constructs

[0394] Additional expression vectors were constructed using pCMV. The full-length α_{1D} cDNA from pVDCCIII(A) (see Example II.A.3.d), the full-length α₂ cDNA, contained on a 3600 bp EcoRI fragment from HBCaCHα₂ (see Example IV.B) and a full-length β₁ subunit cDNA from pHBCaCHβ_{1b}RBS(A) (see Example III.B.3) were separately subcloned into plasmid pCMVβgal. Plasmid pCMVβgal was digested with NotI to remove the lacZ gene. The remaining vector portion of the plasmid, referred to as pCMV, was blunt-ended at the NotI sites. The full-length α₂-encoding DNA and β₁-encoding DNA, contained on separate EcoRI fragments, were isolated, blunt-ended and separately ligated to the blunt-ended vector fragment of pCMV locating the cDNAs between the CMV promoter and SV40 polyadenylation sites in pCMV. To ligate the α_{1D}-encoding cDNA with pCMV, the restriction sites in the polylinkers immediately 5′ of the CMV promoter and immediately 3′ of the SV40 polyadenylation site were removed from pCMV. A polylinker was added at the NotI site. The polylinker had the following sequence of restriction enzyme recognition sites:

| | | | | | | | |
|---|---|---|---|---|---|---|---|
| GGCCGC | EcoRI | SalI | PstI | EcoRV | HindIII | XbaII | GT |
| CG | site | site | site | site | site | site | CACCGG |
| | | | | | | | ↑ |
| NotI | | | | | | | Destroys |
| | | | | | | | Not |

[0395] The α_{1D}-encoding DNA, isolated as a BamHI/XhoI fragment from pVDCCIII(A), was then ligated to XbaII/SalI-digested pCMV to place it between the CMV promoter and SV40 polyadenylation site.

[0396] Plasmid pCMV contains the CMV promoter as does pcDNA1, but differs from pcDNA1 in the location of splice donor/splice acceptor sites relative to the inserted subunit-encoding DNA. After inserting the subunit-encoding DNA into pCMV, the splice donor/splice acceptor sites are located 3′ of the CMV promoter and 5′ of the subunit-encoding DNA start codon. After inserting the subunit-encoding DNA into pcDNA1, the splice donor/splice acceptor sites are located 3′ of the subunit cDNA stop codon.

[0397] 2. Transfection of HEK 293 Cells

[0398] HEK 293 cells were transiently co-transfected with the α_{1D}, α₂ and β₁ subunit-encoding DNA in pCMV or with the α_{1D}, α₂ and β₁ subunit-encoding DNA in pcDNA1 (vectors pVDCCIII(A), pHBCaCHα₂A and pHBCaCHβ_{1b}RBS(A), respectively), as described in Example VII.B.1.a. Plasmid pCMVβgal was included in each transfection as a measure of transfection efficiency. The results of β-galactosidase assays of the transfectants (see Example VII.B.2.), indicated that HEK 293 cells were transfected equally efficiently with pCMV- and pcDNA1-based plasmids. The pcDNA1-based plasmids, however, are presently preferred for expression of calcium channel receptors.

[0399] D. Expression in Xenopus laevis Oöcytes of RNA Encoding Human Neuronal Calcium Channel Subunits

[0400] Various combinations of the transcripts of DNA encoding the human neuronal α_{1D}, α₂ and β₁ subunits prepared in vitro were injected into Xenopus laevis oöcytes. Those injected with combinations that included α_{1D} exhibited voltage-activated barium currents.

[0401] 1. Preparation of Transcripts

[0402] Transcripts encoding the human neuronal calcium channel α_{1D}, α₂ and β₁ subunits were synthesized according to the instructions of the mCAP mRNA CAPPING KIT (Strategene, La Jolla, Calif. catalog #200350). Plasmids pVDCC III.RBS(A), containing pcDNA1 and the α_{1D} cDNA that begins with a ribosome binding site and the eighth ATG codon of the coding sequence (see Example III.A.3.d), plasmid pHBCaCHα₁A containing pcDNA1 and an α₂ subunit cDNA (see Example IV), and plasmid pHBCaCHβ_{1b}RBS(A) containing pcDNA1 and the β₁ DNA lacking intron sequence and containing a ribosome binding site (see Example III), were linearized by restriction digestion. The α_{1D} cDNA- and α₂ subunit-encoding plasmids were digested with XhoI, and the β₁ subunit-encoding plasmid was digested with EcoRV. The DNA insert was transcribed with T7 RNA polymerase.

[0403] 2. Injection of Oöcytes

[0404] Xenopus laevis oöcytes were isolated and defolliculated by collagenase treatment and maintained in 100 mM NaCl, 2 mM KCl, 1.8 mM CaCl₂, 1 mM MgCl₂, 5 mM HEPES, pH 7.6, 20 μg/ml ampicillin and 25 μg/ml streptomycin at 19-25° C. for 2 to 5 days after injection and prior to recording. For each transcript that was injected into the oöcyte, 6 ng of the specific mRNA was injected per cell in a total volume of 50 nl.

[0405] 3. Intracellular Voltage Recordings

[0406] Injected oöcytes were examined for voltage-dependent barium currents using two-electrode voltage clamp methods [Dascal, N. (1987) CRC Crit. Rev. Biochem. 22:317]. The pClamp (Axon Instruments) software package was used in conjunction with a Labmaster 12.5 kHz data acquisition interface to generate voltage commands and to acquire and analyze data. Quattro Professional was also used in this analysis. Current signals were digitized at 1-5 kHz, and filtered appropriately. The bath solution contained of the following: 40 mM BaCl₂, 36 mM tetraethylammonium chloride (TEA-Cl), 2 mM KCl, 5 mM 4-aminopyridine, 0.15 mM niflumic acid, 5 mM HEPES, pH. 7.6.

[0407] a. Electrophysiological Analysis of Oöcytes Injected with Transcripts Encoding the Human Neuronal Calcium Channel α₁, α₂ and β₁-Subunits

[0408] Uninjected oöcytes were examined by two-electrode voltage clamp methods and a very small (25 nA) endogenous inward Ba²⁺ current was detected in only one of seven analyzed cells.

[0409] Oöcytes coinjected with α_{1D}, α₂ and β₁ subunit transcripts expressed sustained inward barium currents upon depolarization of the membrane from a holding potential of −90 mV or −50 mV (154±129 nA, n=21). These currents typically showed little inactivation when test pulses ranging from 140 to 700 msec. were administered. Depolarization to a series of voltages revealed currents that first appeared at approximately −30 mV and peaked at approximately 0 mV.

[0410] Application of the DHP Bay K 8644 increased the magnitude of the currents, prolonged the tail currents present upon repolarization of the cell and induced a hyperpolarizing shift in current activation. Bay K 8644 was prepared fresh from a stock solution in DMSO and introduced as a 10× concentrate directly into the 60 μl bath while the perfusion pump was turned off. The DMSO concentration of the final diluted drug solutions in contact with the cell never exceeded 0.10%. Control experiments showed that 0.1% DMSO had no effect on membrane currents.

[0411] Application of the DHP antagonist nifedipine (stock solution prepared in DMSO and applied to the cell as described for application of Bay K 8644) blocked a substantial fraction (91±6%, n=7) of the inward barium current in oöcytes coinjected with transcripts of the α_{1D}, α₂ and β₁ subunits. A residual inactivating component of the inward barium current typically remained after nifedipine application. The inward barium current was blocked completely by 50 μM Cd²⁺, but only approximately 15% by 100 μM Ni²⁺.

[0412] The effect of ωCgTX on the inward barium currents in oöcytes co-injected with transcripts of the α_{1D}, α₂ and β₁ subunits was investigated. ωCgTX (Bachem, Inc., Torrance Calif.) was prepared in the 15 mM BaCl₂ bath solution plus 0.1% cytochrome C (Sigma) to serve as a carrier protein. Control experiments showed that cytochrome C had no effect on currents. A series of voltage pulses from a −90 mV holding potential to 0 mV were recorded at 20 msec. intervals. To reduce the inhibition of ωCgTX binding by divalent cations, recordings were made in 15 mM BaCl₂, 73.5 mM tetraethylammonium chloride, and the remaining ingredients identical to the 40 mM Ba²⁺ recording solution. Bay K 8644 was applied to the cell prior to addition to ωCgTX in order to determine the effect of ωCgTX on the DHP-sensitive current component that was distinguished by the prolonged tail currents. The inward barium current was blocked weakly (54±29%, n=7) and reversibly by relatively high concentrations (10-15 μM) of ωCgTX. The test currents and the accompanying tail currents were blocked progressively within two to three minutes after application of ωCgTX, but both recovered partially as the ωCgTX was flushed from the bath.

[0413] b. Analysis of Oöcytes Injected with Transcripts Encoding the Human Neuronal Calcium Channel α_{1D} or Transcripts Encoding an α_{1D} and Other Subunits

[0414] The contribution of the α₂ and β₁ subunits to the inward barium current in oöcytes injected with transcripts encoding the α_{1D}, α₂ and β₁ subunits was assessed by expression of the α_{1D} subunit alone or in combination with either the β₁ subunit or the α₂ subunit. In oöcytes injected with only the transcript of a α_{1D} cDNA, no Ba²⁺ currents were detected (n=3). In oöcytes injected with transcripts of α_{1D} and β₁ cDNAs, small (108±39 nA) Ba²⁺ currents were detected upon depolarization of the membrane from a holding potential of −90 mV that resembled the currents observed in cells injected with transcripts of α_{1D}, α₂ and β₁ cDNAs, although the magnitude of the current was less. In two of the four oöcytes injected with transcripts of the α_{1D}-encoding and β₁-encoding DNA, the Ba²⁺ currents exhibited a sensitivity to Bay K 8644 that was similar to the Bay K 8644 sensitivity of Ba²⁺ currents expressed in oöcytes injected with transcripts encoding the α_{1D} , α₁-, α₂- and β₁ subunits.

[0415] Three of five oöcytes injected with transcripts encoding the α_{1D} and α₂ subunits exhibited very small Ba²⁺ currents (15-30 nA) upon depolarization of the membrane from a holding potential of −90 mV. These barium currents showed little or no response to Bay K 8644.

[0416] c. Analysis of Oöcytes Injected with Transcripts Encoding the Human Neuronal Calcium Channel α₂ and/or β₁ Subunit

[0417] To evaluate the contribution of the α_{1D} α₁-subunit to the inward barium currents detected in oöcytes co-injected with transcripts encoding the α_{1D}, α₂ and β₁ subunits, oöcytes injected with transcripts encoding the human neuronal calcium channel α₂ and/or β₁ subunits were assayed for barium currents. Oöcytes injected with transcripts encoding the α₂ subunit displayed no detectable inward barium currents (n=5). Oöcytes injected with transcripts encoding β₁ subunit displayed measurable (54±23 nA, n=5) inward barium currents upon depolarization and oöcytes injected with transcripts encoding the α₂ and β₁ subunits displayed inward barium currents that were approximately 50% larger (80±61 nA, n=18) than those detected in oöcytes injected with transcripts of the β₁-encoding DNA only.

[0418] The inward barium currents in oöcytes injected with transcripts encoding the β₁ subunit or α₂ and β₁ subunits typically were first observed when the membrane was depolarized to −30 mV from a holding potential of −90 mV and peaked when the membrane was depolarized to 10 to 20 mV. Macroscopically, the currents in oöcytes injected with transcripts encoding the α₂ and β₁ subunits or with transcripts encoding the β₁ subunit were indistinguishable. In contrast to the currents in oöcytes co-injected with transcripts of α_{1D}, α₂ and β₁ subunit cDNAs, these currents showed a significant inactivation during the test pulse and a strong sensitivity to the holding potential. The inward barium currents in oöcytes co-injected with transcripts encoding the α₂ and β₁ subunits usually inactivated to 10-60% of the peak magnitude during a 140-msec pulse and were significantly more sensitive to holding potential than those in oöcytes co-injected with transcripts encoding the α_{1D}, α₂ and β₁ subunits. Changing the holding potential of the membranes of oöcytes co-injected with transcripts encoding the α₂ and β₁ subunits from −90 to −50 mV resulted in an approximately 81% (n=11) reduction in the magnitude of the inward barium current of these cells. In contrast, the inward barium current measured in oöcytes co-injected with transcripts encoding the α_{1D}, α₂ and β₁ subunits were reduced approximately 24% (n=11) when the holding potential was changed from −9.0 to −50 mV.

[0419] The inward barium currents detected in oöcytes injected with transcripts encoding the α₂ and β₁ subunits were pharmacologically distinct from those observed in oöcytes co-injected with transcripts encoding the α_{1D}, α₂ and β₁ subunits. Oöcytes injected with transcripts encoding the α₂ and β₁ subunits displayed inward barium currents that were insensitive to Bay K 8644 (n=11). Nifedipine sensitivity was difficult to measure because of the holding potential sensitivity of nifedipine and the current observed in oöcytes injected with transcripts encoding the α₂ and β₁ subunits. Nevertheless, two oöcytes that were co-injected with transcripts encoding the α₂ and β₁ subunits displayed measurable (25 to 45 nA) inward barium currents that were insensitive to nifedipine (5 to 10 μM), when depolarized from a holding potential of −50 mV. The inward barium currents in oöcytes injected with transcripts encoding the α₂ and β₁ subunits showed the same sensitivity to heavy metals as the currents detected in oöcytes injected with transcripts encoding the α_{1D}, α₂ and β₁ subunits.

[0420] The inward barium current detected in oöcytes injected with transcripts encoding the human neuronal α₂ and β₁ subunits has pharmacological and biophysical properties that resemble calcium currents in uninjected Xenopus oöcytes. Because the amino acids of this human neuronal calcium channel β₁ subunit lack hydrophobic segments capable of forming transmembrane domains. It is unlikely that recombinant β₁ subunits alone form an ion channel, but rather that an endogenous α₁ subunit exists in oöcytes and that the activity mediated by such an α₁ subunit is enhanced by expression of a human neuronal β₁ subunit.

[0421] E. Expression of DNA Encoding Human Neuronal Calcium Channel α_{1B}, α_{2B} and β₁₋₂ Subunits in HEK Cells

[0422] 1. Transfection of HEK Cells

[0423] The transient expression of the human neuronal α_{1B-1}, α_{2b} and β₁₋₂ subunits was studied in HEK293 cells. The HEK293 cells were grown as a monolayer in Dulbecco's modified Eagle's medium (Gibco) containing 5% defined-supplemented bovine calf serum (Hyclone) plus penicillin G (100 U/ml) and streptomycin sulfate (100 μg/ml). HEK293 cell transfections were mediated by calcium phosphate as described above. Transfected cells were examined for inward Ba²⁺ currents (I_{Ba}) mediated by voltage-dependent Ca²⁺ channels.

[0424] Cells were transfected (2×10⁶ per polylysine-coated plate). Standard transfections (10-cm dish) contained 8 μg of pcDNAα_{1B-1}, 5 μg of pHBCaCHα₂A, 2 μg pHBCaCHβ_{1b}RBS(A) (see, Examples II.A.3, IV.B. and III), 2 μg of CMVβ (Clontech) β-galactosidase expression plasmid, and pUC18 to maintain a constant mass of 20 μg/ml. Cells were analyzed 48 to 72 hours after transfection. Transfection efficiencies (±10%), which were determined by in situ histochemical staining for β-galactosidase activity (Sanes et al. (1986) EMBO J., 5:3133), generally were greater than 50%.

[0425] 2. Electrophysiological Analysis of Transfectant Currents

[0426] a. Materials and Methods

[0427] Properties of recombinantly expressed Ca²⁺ channels were studied by whole cell patch-clamp techniques. Recordings were performed on transfected HEK293 cells 2 to 3 days after transfection. Cells were plated at 100,000 to 300,000 cells per polylysine-coated, 35-mm tissue culture dishes (Falcon, Oxnard, Calif.) 24 hours before recordings. Cells were perfused with 15 mM BaCl₂, 125 mM choline chloride, 1 mM MgCl₂, and 10 mM Hepes (pH 7.3) adjusted with tetraethylammonium hydroxide (bath solution). Pipettes were filled with 135 mM CsCl, 10 mM EGTA, 10 mM Hepes, 4 mM Mg-adenosine triphosphate (pH=7.5) adjusted with tetraethylammonium hydroxide. Sylgard (Dow-Corning, Midland, Mich.)-coated, fire-polished, and filled pipettes had resistances of 1 to 2 megohm before gigohm seals were established to cells.

[0428] Bay K 8644 and nifedipine (Research Biochemicals, Natick, Mass.) were prepared from stock solutions (in dimethyl sulfoxide) and diluted into the bath solution. The dimethyl sulfoxide concentration in the final drug solutions in contact with the cells never exceeded 0.1%. Control experiments showed that 0.1% dimethyl sulfoxide had no effect on membrane currents. ωCgTX (Bachem, Inc., Torrance, Calif.) was prepared in the 15 mM BaCl₂ bath solution plus 0.1% cytochrome C (Sigma, St. Louis, Mo.) to serve as a carrier protein. Control experiments showed that cytochrome C had no effect on currents. These drugs were dissolved in bath solution, and continuously applied by means of puffer pipettes as required for a given experiment. Recordings were performed at room temperature (22° to 25° C.). Series resistance compensation (70 to 85%) was employed to minimize voltage error that resulted from pipette access resistance, typically 2 to 3.5 megohm. Current signals were filtered (−3 dB, 4-pole Bessel) at a frequency of 1/4 to 1/5 the sampling rate, which ranged from 0.5 to 3 kHz. Voltage commands were generated and data were acquired with CLAMPEX (pClamp, Axon Instruments, Foster City, Calif.). All reported data are corrected for linear leak and capacitive components. Exponential fitting of currents was performed with CLAMPFIT (Axon Instruments, Foster City, Calif.).

[0429] b. Results

[0430] Transfectants were examined for inward Ba²⁺ currents (I_{Ba}). Cells cotransfected with DNA encoding α_{1B-1}, α_{2b}, and β₁₋₂ subunits expressed high-voltage-activated Ca²⁺ channels.

[0431] I_{Ba} first appeared when the membrane was depolarized from a holding potential of −90 mV to −20 mV and peaked in magnitude at 10 mV. Thirty-nine of 95 cells (12 independent transfections) had I_{Ba} that ranged from 30 to 2700 pA, with a mean of 433 pA. The mean current density was 26 pA/pF, and the highest density was 150 pA/pF. The I_{Ba} typically increased by 2- to 20-fold during the first 5 minutes of recording. Repeated depolarizations during long records often revealed rundown of I_{Ba} usually not exceeding 20% within 10 min. I_{Ba} typically activated within 10 ms and inactivated with both a fast time constant ranging from 46 to 105 ms and a slow time constant ranging from 291 to 453 ms (n=3). Inactivation showed a complex voltage dependence, such that I_{Ba} elicited at ≧20 mV inactivated more slowly than I_{Ba} elicited at lower test voltages, possibly a result of an increase in the magnitude of slow compared to fast inactivation components at higher test voltages.

[0432] Recombinant α_{1B-1}α_{2b}β₁₋₂ channels were sensitive to holding potential. Steady-state inactivation of I_{Ba}, measured after a 30- to 60-s conditioning at various holding potentials, was approximately 50% at holding potential between −60 and −70 mV and approximately 90% at −40 mV. Recovery of I_{Ba} from inactivation was usually incomplete, measuring 55 to 75% of the original magnitude within 1 min. after the holding potential was returned to more negative potentials, possibly indicating some rundown or a slow recovery rate.

[0433] Recombinant α_{1B-1}α_{2b}β₁₋₂ channels were also blocked irreversibly by ω-CgTx concentrations ranging from 0.5 to 10 μM during the time scale of the experiments. Application of 5 μM toxin (n=7) blocked the activity completely within 2 min., and no recovery of I_{Ba} was observed after washing ω-CgTx from the bath for up to 15 min. Pd²⁺ blockage (50 μM) was rapid, complete, and reversible; the DHPs Bay K 8644 (1 μM; n=4) or nifedipine (5 μM; n=3) had no discernible effect.

[0434] Cells cotransfected with DNA encoding α_{1B-1}, α_{2b}, and β₁₋₂ subunits predominantly displayed a single class of saturable, high-affinity ω-CgTx binding sites. The determined dissociation constant (K_{d}) value was 54.6±14.5 pM (n=4). Cells transfected with the vector containing only β-galactosidase-encoding DNA or α_{2b}β-encoding DNA showed no specific binding. The binding capacity (Bₘₐₓ) of the α_{1B-1}α_{2b}β-transfected cells was 28,710±11,950 sites per cell (n=4).

[0435] These results demonstrate that α_{1B-1}α_{2b}β₁₋₂-transfected cells express high-voltage-activated, inactivating Ca²⁺ channel activity that is irreversibly blocked by ω-CgTx, insensitive to DHPs, and sensitive to holding potential. The activation and inactivation kinetics and voltage sensitivity of the channel formed in these cells are generally consistent with previous characterizations of neuronal N-type Ca²⁺ channels.

[0436] F. Expression of DNA Encoding Human Neuronal Calcium Channel α_{1B-1}, α_{1B-2}, α_{2B}, β₁₋₂ and β₁₋₃ Subunits in HEK Cells

[0437] Significant Ba²⁺ currents were not detected in untransfected HEK293 cells. Furthermore, untransfected HEK293 cells do not express detectable ω-CgTx GVIA binding sites. In order to approximate the expression of a homogeneous population of trimeric α_{1B}, α_{2b} and β₁ protein complexes in transfected HEK293 cells, the α_{1B}, α_{2b} and β₁ expression levels were altered. The efficiency of expression and assembly of channel complexes at the cell surface were optimized by adjusting the molar ratio of α_{1B}, α_{2b} and β₁ expression plasmids used in the transfections. The transfectants were analyzed for mRNA levels, ω-CgTx GVIA binding and Ca²⁺ channel current density in order to determine near optimal channel expression in the absence of immunological reagents for evaluating protein expression. Higher molar ratios of α_{2b} appeared to increase calcium channel activity.

[0438] 1. Transfections

[0439] HEK293 cells were maintained in DMEM (Gibco #320-1965AJ), 5.5% Defined/Supplemented bovine calf serum (Hyclone #A-2151-L), 100 U/ml penicillin G and 100 μg/ml streptomycin. Ca²⁺-phosphate based transient transfections were performed and analyzed as described above. Cells were co-transfected with either 8 μg pcDNA1α_{1B-1} (described in Example II.C), 5 μg pHBCaCHα₂A (see, Example IV.B.), 2 μg pHBCaCHβ_{1b}RBS(A) (β₁₋₂ expression plasmid; see Examples III.A. and IX.E.), and 2 μg pCMVβ-gal [Clontech, Palo Alto, Calif.] (2:1.8:1 molar ratio of Ca²⁺ channel subunit expression plasmids) or with 3 μg pcDNA1α_{1B-1} or pcDNA1α_{1B-2}, 11.25 μg pHBCaCHα₂A, 0.75 or 1.0 μg pHBCaCHβ_{1b}RBS(A) or pcDNA1β₁₋₃ and 2 μg pCMVβ-gal (2:10.9:1 molar ratio of Ca²⁺ channel subunit expression plasmids). Plasmid pCMVβ-gal, a β-galactosidase expression plasmid, was included in the transfections as a marker to permit transfection efficiency estimates by histochemical staining. When less than three subunits were expressed, pCMVPL2, a pCMV promoter-containing vector that lacks a cDNA insert, was substituted to maintain equal moles of pCMV-based DNA in the transfection. pUC18 DNA was used to maintain the total mass of DNA in the transfection at 20 μg/plate.

[0440] RNA from the transfected cells was analyzed by Northern blot analysis for calcium channel subunit mRNA expression using random primed ³²P-labeled subunit specific probes. HEK293 cells co-transfected with α_{1B-1}, α_{2b} and β₁₋₂ expression plasmids (8, 5 and 2 μg, respectively; molar ratio=2:1.8:1) did not express equivalent levels of each Ca²⁺ channel subunit mRNA. Relatively high levels of α_{1B-1} and β₁₋₂ mRNAs were expressed, but significantly lower levels of α_{2b} mRNA were expressed. Based on autoradiograph exposures required to produce equivalent signals for all three mRNAs, α_{2b} transcript levels were estimated to be 5 to 10 times lower than α_{1B-1} and β₁₋₂ transcript levels. Untransfected HEK293 cells did not express detectable levels of α_{B-1}, α_{2b} or β₁₋₂ mRNAs.

[0441] To achieve equivalent Ca²⁺ channel subunit mRNA expression levels, a series of transfections was performed with various amounts of α_{1B-1}, α_{2b} and β₁₋₂ expression plasmids. Because the α_{1B-1}, and β₁₋₂ mRNAs were expressed at very high levels compared to α_{2b} mRNA, the mass of (α_{1B-1} and β₁₋₂ plasmids was lowered and the mass of α_{2b} plasmid was increased in the transfection experiments. Co-transfection with 3, 11.25 and 0.75 μg of α_{1B-1}, α_{2b} and β₁₋₂ expression plasmids, respectively (molar ratio=2:10.9:1), approached equivalent expression levels of each Ca²⁺ channel subunit mRNA. The relative molar quantity of α_{2b} expression plasmid to α_{1B-3} and β₁₋₂ expression plasmids was increased 6-fold. The mass of α_{1B-1} and β₁₋₂ plasmids in the transfection was decreased 2.67-fold and the mass of α_{2b} plasmid was increased 2.25-fold. The 6-fold molar increase of α_{2b} relative to α_{1B-1} and β₁₋₂ required to achieve near equal abundance mRNA levels is consistent with the previous 5- to 10-fold lower estimate of relative α_{2b} mRNA abundance. ω-CgTx GVIA binding to cells transfected with various amounts of expression plasmids indicated that the 3, 11.25 and 0.75 μg of α_{1B-1}, α_{2b} and β₁₋₂ plasmids, respectively, improved the level of cell surface expression of channel complexes. Further increases in the mass of α_{2b} and β₁₋₂ expression plasmids while α_{1B-1} was held constant, and alterations in the mass of the α_{1B-1} expression plasmid while α_{2b} and β₁₋₂ were held constant, indicated that the cell surface expression of ω-CgTx GVIA binding sites per cell was nearly optimal. All subsequent transfections were performed with 3, 11.25 and 0.75 μg or 1.0 μg of α_{1B-1}, or α_{1B-2}, α_{2b} and β₁₋₂ or β₁₋₃ expression plasmids, respectively.

[0442] 2. ¹²⁵I-ω-CgTx GVIA Binding to Transfected Cells

[0443] Statistical analysis of the K_{d} and Bₘₐₓ values was performed using one-way analysis of variance (ANOVA) followed by the Tukey-Kramer test for multiple pairwise comparisons (p≦0.05).

[0444] Combinations of human voltage-dependent Ca²⁺ channel subunits, α_{1B-1}, α_{1B-2}, α_{2b}, β₁₋₂ and β₁₋₃, were analyzed for saturation binding of ¹²⁵I-ω-CgTx GVIA. About 200,000 cells were used per assay, except for the α_{1B-1}, α_{1B-2}, α_{1B-1}α_{2b} and α_{1B-2}α_{2b} combinations which were assayed with 1×10⁶ cells per tube. The transfected cells displayed a single-class of saturable, high-affinity binding sites. The values for the dissociation constants (K_{d}) and binding capacities (Bₘₐₓ) were determined for the different combinations. The results are summarized as follows:

| Subunit Combination | K_{d} (pM) | Bₘₐₓ (sites/cell) |
|---|---|---|
| α_{1B-1}α_{2b}β₁₋₂ | 54.9 ± 11.1 (n = 4) | 45,324 ± 15,606 |
| α_{1B-1}α_{2b}β₁₋₃ | 53.2 ± 3.6 (n = 3) | 91,004 ± 37,654 |
| α_{1B-1}β₁₋₂ | 17.9 ± 1.9 (n = 3) | 5,756 ± 2,163 |
| α_{1B-1}β₁₋₃ | 17.9 ± 1.6 (n = 3) | 8,729 ± 2,980 |
| α_{1B-1}α_{2b} | 84.6 ± 15.3 (n = 3) | 2,256 ± 356 |
| α_{1B-1} | 31.7 ± 4.2 (n = 3) | 757 ± 128 |
| α_{1B-2}α_{2b}β₁₋₂ | 53.0 ± 4.8 (n = 3) | 19,371 ± 3,798 |
| α_{1B-2}α_{2b}β₁₋₃ | 44.3 ± 8.1 (n = 3) | 37,652 ± 8,129 |
| α_{1B-2}β₁₋₂ | 16.4 ± 1.2 (n = 3) | 2,126 ± 412 |
| α_{1B-2}β₁₋₃ | 22.2 ± 5.8 (n = 3) | 2,944 ± 1,168 |
| α_{1B-2}α_{2b} | N.D. (n = 3) | N.D. |
| α_{1B-2} | N.D. | N.D. |

*N.D. = not detectable

[0445] Cells transfected with subunit combinations lacking either the α_{1B-1} or the α_{1B-2} subunit did not exhibit any detectable ¹²⁵I-ω-CgTx GVIA binding (≦600 sites/cell). ¹²⁵I-ω-CgTx GVIA binding to HEK293 cells transfected with α_{1B-2} alone or α_{1B-2}α_{2b} was too low for reliable Scatchard analysis of the data. Comparison of the K_{d} and Bₘₐₓ values revealed several relationships between specific combinations of subunits and the binding affinities and capacities of the transfected cells. In cells transfected with all three subunits, (α_{1B-1}α_{2b}β₁₋₂-, α_{1B-1}α_{2b}β₁₋₃-, α_{1B-2}α_{2b}β₁₋₂-, or α_{1B-2}α_{2b}β₁₋₃- transfectants) the K_{d} values were indistinguishable (p>0.05), ranging from 44.3±8.1 pM to 54.9±11.1 pM. In cells transfected with two-subunit combinations lacking the α_{2b} subunit (α_{1B-1β}₁₋₂, α_{1B-1}β₁₋₃, α_{1B-2}β₁₋₂ or α_{1B-2}β₁₋₃) the K_{d} values were significantly lower than the three-subunit combinations (p<0.01), ranging from 16.4±1.2 to 22.2±5.8 pM. Cells transfected with only the α_{1B-1} subunit had a K_{d} value of 31.7±4.2 pM, a value that was not different from the two-subunit combinations lacking α_{2b} (p<0.05). As with the comparison between the four α_{1B}α_{2b}β₁ versus α_{1B}β₁ combinations, when the α_{1B-1} was co-expressed with α_{2b}, the K_{d} increased significantly (p<0.05) from 31.7±4.2 to 84.6±5.3 pM. These data demonstrate that co-expression of the α_{2b} subunit with α_{1B-1}, α_{1B-1}β₁₋₂, α_{1B-1}β₁₋₃, α_{1B-2}β₁₋₂ or α_{1B-2}β₁₋₃ subunit combinations results in lower binding affinity of the cell surface receptors for ¹²⁵I-ω-CgTx GVIA. The Bₘₐₓ values of cells transfected with various subunit combinations also differed considerably. Cells transfected with the α_{1B-1} subunit alone expressed a low but detectable number of binding sites (approximately 750 binding sites/cell). When the α_{1B-1} subunit was co-expressed with the α_{2b} subunit, the binding capacity increased approximately three-fold while co-expression of a β₁₋₂ or β₁₋₃ subunit with α_{1B-1} resulted in 8- to 10-fold higher expression of surface binding. Cells transfected with all three subunits expressed the highest number of cell surface receptors. The binding capacities of cells transfected with α_{1B-1}α_{2b}β₁₋₃ or α_{1B-2}α_{2b}β₁₋₃ combinations were approximately two-fold higher than the corresponding combinations containing the β₁₋₂ subunit. Likewise, cells transfected with α_{1B-1}α_{2b}β₁₋₂ or α_{1B-1}α_{2b}β₁₋₃ combinations expressed approximately 2.5-fold more binding sites per cell than the corresponding combinations containing α_{1B-2}. In all cases, co-expression of the α_{2b} subunit with α_{1B} and β₁ increased the surface receptor density compared to cells transfected with only the corresponding α_{1B} and β₁ combinations; approximately 8-fold for α_{1B-1}α_{2b}β₁₋₂, 10-fold for α_{1B-1}α_{2b}β₁₋₃, 9-fold for α_{1B-2}α_{2b}β₁₋₂, and 13-fold for α_{1B-2}α_{2b}β₁₋₃. Thus, comparison of the Bₘₐₓ values suggests that the toxin-binding subunit, α_{1B-1} or α_{1B-2}, is more efficiently expressed and assembled on the cell surface when co-expressed with either the α_{2b} or the β₁₋₂ or β₁₋₃ subunit, and most efficiently expressed when α_{2b} and β₁ subunits are present.

[0446] 3. Electrophysiology

[0447] Functional expression of α_{1B-1}α_{2b}β₁₋₂ and α_{1B-1}β₁₋₂ subunit combinations was evaluated using the whole-cell recording technique. Transfected cells that had no contacts with surrounding cells and simple morphology were used approximately 48 hours after transfection for recording. The pipette solution was (in mM) 135 CsCl, 10 EGTA, 1 MgCl₂, 10 HEPES, and 4 mM Mg-ATP (pH 7.3, adjusted with TEA-OH). The external solution was (in mM) 15 BaCl₂, 125 Choline Cl, 1 MgCl₂, and 10 HEPES (pH 7.3, adjusted with TEA-OH). ω-CgTx GVIA (Bachem) was prepared in the external solution with 0.1% cytochrome. C (Sigma) to serve as a carrier, Control experiments showed that cytochrome C had no effect on the Ba²⁺ current.

[0448] The macroscopic electrophysiological properties of Ba²⁺ currents in cells transfected with various amounts of the α_{2b} expression plasmid with the relative amounts of α_{1B-1} and β₁₋₂ plasmids held constant were examined. The amplitudes and densities of the Ba²⁺ currents (15 mM BaCl₂) recorded from whole cells of these transfectants differed dramatically. The average currents from 7 to 11 cells of three types of transfections (no α_{2b}; 2:1.8:1 [α_{1B-1}:α_{2b}:β₁₋₂] molar ratio; and 2:10.9:1 [α_{1B-1}:α_{2b}:β₁₋₂] molar ratio) were determined. The smallest currents (range: 10 to 205 pA) were recorded when α_{2b} was not included in the transfection, and the largest currents (range: 50 to 8300 pA) were recorded with the 2:10.9:1 ratio of α_{1B-1}α_{2b}β₁₋₂ plasmids, the ratio that resulted in near equivalent mRNA levels for each subunit transcript. When the amount of α_{2b} plasmid was adjusted to yield approximately an equal abundance of subunit mRNAs, the average peak Ba²⁺ current increased from 433 pA to 1,824 pA (4.2-fold) with a corresponding increase in average current density from 26 pA/pF to 127 pA/pF (4.9-fold). This increase is in the presence of a 2.7-fold decrease in the mass of α_{1B-1} and β₁₋₂ expression plasmids in the transfections. In all transfections, the magnitudes of the Ba²⁺ currents did not follow a normal distribution.

[0449] To compare the subunit combinations and determine the effects of α_{2b}, the current-voltage properties of cells transfected with α_{1B-1}β₁₋₂ or with α_{1B-1}α_{2b}β₁₋₂ in either the 2:1.8:1 (α_{1B-1}:α_{2b}:β₁₋₂) molar ratio or the 2:10.9:1 (α_{1B-1}:α_{2b}:β₁₋₂) molar ratio transfectants were examined. The extreme examples of no α_{2b} and 11.25 μg α_{2b} (2:10.9:1 molar ratio) showed no significant differences in the current voltage plot at test potentials between 0 mV and +40 mV (p<0.05). The slight differences observed at either side of the peak region of the current voltage plot were likely due to normalization. The very small currents observed in the α_{1B-1}β₁₋₂ transfected cells have a substantially higher component of residual leak relative to the barium current that is activated by the test pulse. When the current voltage plots are normalized, this leak is a much greater component than in the α_{1B-1}α_{2b}β₁₋₂ transfected cells and as a result, the current-voltage plot appears broader. This is the most likely explanation of the apparent differences in the current voltage plots, especially given the fact that the current-voltage plot for the α_{1B-1}β₁₋₂ transfected cells diverge on both sides of the peak. Typically, when the voltage-dependence activation is shifted, the entire current-voltage plot is shifted, which was not observed. To qualitatively compare the kinetics of each, the average responses of test pulses from −90 mV to 10 mV were normalized and plotted. No significant differences in activation or inactivation kinetics of whole-cell Ba²⁺ currents were observed with any combination.

[0450] G. Expression of DNA Encoding Human Neuronal Calcium Channel α_{1E-3}α_{2B}β₁₋₃ and α_{1E-1}α_{2B}β₁₋₁ Subunits in HEK Cells

[0451] Functional expression of the α_{1E-1}α_{2B}β₁₋₁ and α_{1E-3}α_{2B}β₁₋₃, as well as α_{1E-3} was evaluated using the whole cell recording technique.

[0452] 1. Methods

[0453] Recordings were performed on transiently transfected HEK 293 cells, which had no contacts with surrounding cells and which had simple morphology, two days following the transfection. The internal solution used to fill pipettes for recording the barium current from the transfected recombinant calcium channels was (in mM) 135 CsCl, 10 EGTA, 1 MgCl₂, 10 HEPES, and 4 mM Mg-ATP (pH 7.4-7.5, adjusted with TEA-OH). The external solution for recording the barium current was (in mM) 15 BaCl₂, 150 Choline Cl, 1 MgCl₂, and 10 HEPES and 5 TEA-OH (pH 7.3, adjusted with TEA-OH). In experiments in which Ca²⁺ was replaced for Ba²⁺, a Laminar flow chamber was used in order to completely exchange the extracellular solution and prevent any mixing of Ba²⁺ and Ca²⁺. ω-CgTx GVIA was prepared in the external solution with 0.1% cytochrome C to serve as a carrier, the toxin was applied by pressurized puffer pipette. Series resistance was compensated 70-85% and currents were analyzed only if the voltage error from series resistance was less than 5 mV. Leak resistance and capacitance was corrected by subtracting the scaled current observed with the P/−4 protocol as implemented by pClamp (Axon Instruments).

[0454] 2. Electrophysiology Results

[0455] Cells transfected with α_{1E-1}α_{2b}β₁₋₃ or α_{1E-3}α_{2b}β₁₋₃ showed strong barium currents with whole cell patch clamp recordings. Cells expressing α_{1E-3}α_{2b}β₁₋₃ had larger peak currents than those expressing α_{1E-1}α_{2b}β₁₋₃. In addition, the kinetics of activation and inactivation are clearly substantially faster in the cells expressing α_{1E} calcium channels. HEK 293 cells expressing α_{1E-3} alone have a significant degree of functional calcium channels, with properties similar to those expressing α_{1E}α_{2b}β₁₋₃ but with substantially smaller peak barium currents. Thus, with α_{E}, the α₂ and β₁ subunits are not required for functional expression of α_{1E} mediated calcium channels, but do substantially increase the number of functional calcium channels.

[0456] Examination of the current voltage properties of α_{1E}α_{2b}β₁₋₃ expressing cells indicates that α_{1E-3}α_{2b}β₁₋₃ is a high-voltage activated calcium channel and the peak current is reached at a potential only slightly less positive than other neuronal calcium channels also expressing α_{2b} and β₁, and α_{1B} and α_{1D}. Current voltage properties of α_{1E-1}α_{2b}β₁₋₃ and α_{1E-3}α_{2b}β₁₋₃ are statistically different from those of α_{1E-1}α_{2b}β₁₋₃. Current voltage curves for α_{1E-1}α_{2b}β₁₋₃ and α_{1E-3}α_{2b}β₁₋₃ peak at approximately +5 mV, as does the current voltage curve for α_{1E-3} alone.

[0457] The kinetics and voltage dependence of inactivation using both prepulse (200 ms) and steady-state inactivation was examined. α_{1E} mediated calcium channels are rapidly inactivated relative to previously cloned calcium channels and other high voltage-activated calcium channels. α_{1E-3}α_{2b}β₁₋₃ mediated calcium channels are inactivated rapidly and are thus sensitive to relatively brief (200 ms) prepulses as well as long prepulses (>20 s steady state inactivation), but recover rapidly from steady state inactivation. The kinetics of the rapid inactivation has two components, one with a time constant of approximately 25 ms and the other approximately 400 Ms.

[0458] To determine whether α_{1E} mediated calcium channels have properties of low voltage activated calcium channels, the details of tail currents activated by a test pulse ranging −60 to +90 mV were measured at −60 mV. Tail currents recorded at −60 mV could be well fit by a single exponential of 150 to 300 μs; at least an order of magnitude faster than those typically observed with low voltage-activated calcium channels.

[0459] HEK 293 cells expressing α_{1E-3}α_{2b}β₁₋₃ flux more current with Ba²⁺ as the charge carrier and currents carried by Ba²⁺ and Ca²⁺ have different current-voltage properties. Furthermore, the time course of inactivation is slower and the amount of prepulse inactivation less with Ca²⁺ as the charge carrier.

[0460] While the invention has been described with some specificity, modifications apparent to those with ordinary skill in the art may be made without departing from the scope of the invention. Since such modifications will be apparent to those of skill in the art, it is intended that this invention be limited only by the scope of the appended claims.

What is claimed is:

1. An isolated nucleic acid fragment that encodes a subunit of a human calcium channel, comprising a sequence of nucleotides that encodes the subunit, wherein the sequence of nucleotides encoding the subunit is selected from among:
(a) a sequence of nucleotides that encodes a human calcium channel subunit and includes the sequence of nucleotides set forth in any of SEQ ID Nos. 1-38;
(b) a sequence of nucleotides that encodes the subunit and hybridizes under conditions of high stringency to DNA that is complementary to an mRNA transcript present in a human cell that encodes a subunit that includes a sequence of nucleotides set forth in any of SEQ ID Nos. 1-38;
(c) a sequence of nucleotides that encodes the subunit that includes a sequence of amino acids encoded by any of SEQ ID Nos. 1-38; and
(d) a sequence of nucleotides that encodes a subunit that includes a sequence of amino acids encoded by a sequence of nucleotides that encodes such subunit and hybridizes under conditions of high stringency to DNA that is complementary to an mRNA transcript present in a human cell that encodes the subunit that includes the sequence of nucleotides set forth in any of SEQ ID Nos. 1-38.

2. An isolated fragment of claim 1, comprising a sequence of nucleotides that encodes an α₁-subunit of a human calcium channel.

3. The fragment of claim 1, wherein the α₁-subunit is a human neural calcium channel α₁ subunit.

4. The fragment of claim 1, wherein the α₁ subunit is an α_{1D}-subunit, α_{1C}-subunit, α_{1B}-subunit, α_{1E}-subunit or an α_{1A}-subunit.

5. The fragment of claim 2, comprising a sequence of nucleotides that encodes an α₁ subunit selected from the group consisting of α_{1A-1}, α_{1A-2}, α_{1E-1}, α_{1C-2} and α_{1E-3}.

6. An isolated fragment, comprising a sequence of nucleotides that encodes a β-subunit of a human calcium channel.

7. The fragment of claim 6, comprising a sequence of nucleotides that encodes a β₂-subunit.

8. The DNA fragment of claim 7, wherein the subunit is a β_{2C}, β_{2D} or β_{2E} subunit.

9. The fragment of claim 6, that encodes a β₃-subunit.

10. The fragment of claim 7, that encodes a β₄-subunit.

11. A eukaryotic cell, comprising heterologous DNA that encodes at an α₁-subunit, wherein the α₁-subunit is encoded by the DNA of claim 2.

12. The cell of claim 11, further comprising heterologous DNA that encodes a β-subunit of a human calcium channel.

13. The eukaryotic cell of claim 12 that has a functional heterologous calcium channel that contains at least one subunit encoded by the heterologous DNA.

14. The eukaryotic cell of claim 11 selected from the group consisting of HEK 293 cells, Chinese hamster ovary cells, African green monkey cells, and mouse L cells.

15. A eukaryotic cell with a functional, heterologous calcium channel, produced by a process comprising:
introducing into the cell heterologous nucleic acid that encodes at least one subunit of a calcium channel, wherein the subunit is encoded by the DNA of claim 1.

16. The eukaryotic cell of claim 15 that is an amphibian oöcyte.

17. A method for identifying a compound that modulates the activity of a calcium channel, comprising;
suspending the eukaryotic cell of claim 13 in a solution containing the compound and a calcium channel selective ion:
depolarizing the cell membrane of the cell; and
detecting the current flowing into the cell, wherein:
the heterologous calcium channel includes at least one human calcium channel subunit encoded by DNA or RNA that is heterologous to the cell,
the current that is detected is different from that produced by depolarizing the same or a substantially identical cell in the presence of the same calcium channel selective ion but in the absence of the compound.

18. The method of claim 17, wherein prior to the depolarization step the cell is maintained at a holding potential which substantially inactivates calcium channels that are endogenous to the cell.

19. The method of claim 18, wherein:
the cell is an amphibian oöcyte;
the heterologous subunits are encoded by RNA injected into the oöcyte; and
the heterologous subunits include an α₁-subunit.

20. The method of claim 19, wherein the subunits encoded by the RNA further comprise a β-subunit.

21. The method of claim 17, wherein the cell is an HEK cell and the heterologous subunit is encoded by heterologous DNA.

22. A substantially pure α₁-subunit encoded by the DNA fragment of claim 2.

23. A substantially pure β-subunit of a human calcium channel encoded by the DNA of claim 6.

24. The DNA fragment of claim 9, wherein the subunit is a β₃₋₁ subunit.

25. The eukaryotic cell of claim 11, comprising heterologous DNA that encodes an α₁ subunit selected from the group of subunits consisting of α_{1A-1}, α_{1A-2}, α_{1C-2}, α_{1E-1}, and α_{1E-3}; wherein:
the heterologous calcium channel contains at least one subunit encoded by the heterologous nucleic acid; and
the only heterologous ion channels are calcium channels.

26. The eukaryotic cell of claim 12, wherein the β-subunit is a β_{2C}, β_{2D}, β_{2E}, β₃₋₁ or a β₄ subunit.

27. The eukaryotic cell of claim 12, wherein the β subunit is a β₂ subunit.

28. The eukaryotic cell of claim 12, wherein the β subunit is a β₄ subunit.

29. The eukaryotic cell of claim 15 with a functional, heterologous calcium channel, produced by a process comprising:
introducing into the cell nucleic acid that encodes an α₁ subunit of a human calcium channel and introducing into the cell nucleic acid that encodes a β₁ subunit of a human calcium channel, wherein:
at least one of the subunits is selected from the group consisting of α_{1A-1}, α_{1A-2}, α_{1E-1}, α_{1E-3}, β_{2C}, β_{2D}, β_{2E}, a β₃ and a β₄ subunit;
the heterologous calcium channel contains at least one subunit encoded by the heterologous nucleic acid; and
the only heterologous ion channels are calcium channels.

30. The eukaryotic cell of claim 29 selected from the group consisting of HEK 293 cells, Chinese hamster ovary cells, African green monkey cells, mouse L cells and amphibian oöcytes.

31. The method of claim 17, wherein:
the heterologous calcium channel includes at least one human calcium channel subunit encoded by DNA or RNA that is heterologous to the cell;
at least one subunit is selected from the group consisting of α_{1A-1}, α_{1A-2}, α_{1E-1}, α_{1E-3}, α_{1C-2}, β_{2C}, β_{2D}, β_{2E}, a β₃ subunit and a β₄ subunit;
the current that is detected is different from that produced by depolarizing the same or a substantially identical cell in the presence of the same calcium channel selective ion but in the absence of the compound.

32. A subunit-specific antibody selected from the group consisting of antibodies that bind to an α subunit subtype or a β subunit subtype of a human calcium channel.

33. The antibody of claim 32, wherein the antibody is subtype specific and the α₁ subunit is α_{1A}, α_{1E} and α_{1B}.

34. An RNA or single-stranded DNA probe of at least 16 bases in length, comprising at least 16 substantially contiguous nucleic acid bases from the sequence of nucleotides of claim 1 that encodes an α₁ or β subunit of a human calcium channel.

35. The RNA or single-stranded DNA probe of claim 54, wherein the subunit is selected from the group of subunits consisting of α_{1A-1}, α_{1A-2}, α_{1E-1}, α_{1C-2}, α_{1E-3}, α_{1C-2}, β_{2C}, β_{2D}, β_{2E}, a β₃ and β₄.

36. The probe of claim 34 that contains at least 30 nucleic acid bases that encode the subunit of a human calcium channel.

37. A method for identifying nucleic acids that encode a human calcium channel subunit, comprising hybridizing under conditions of at least low stringency a probe of claim 34 to a library of nucleic acid fragments, and selecting hybridizing fragments.

38. A method for identifying cells or tissues that express a calcium channel subunit-encoding nucleic acid, comprising hybridizing under conditions of at least low stringency a probe of claim 34 with mRNA expressed in the cells or tissues or cDNA produced from the mRNA, and thereby identifying cells or tissue that express mRNA that encodes the subunit.

39. A substantially pure human calcium channel subunit selected from the group consisting of α_{1A-1}, α_{1A-2}, α_{1E-1}, α_{1C-2}, α_{1E-3}, β₃₋₁, β_{2C}, β_{2D}, β_{2E} and β₄.

40. A method for producing a subunit of a human calcium channel, comprising introducing the fragment of claim 1 into a prokaryotic or eukaryotic host cell, under conditions whereby the encoded subunit is expressed.

The application's sequence listing, which the Patent Office published only in electronic form, follows.

SEQUENCE LISTING (65 sequences)

SEQ ID NO: 1 - DNA, 7635 bp, Human
  CDS (511)...(6996)
  5'UTR (1)...(510)
  3'UTR (6994)...(7635)
gggcgagcgcctccgtccccggatgtgagctccggctgcccgcggtcccgagccagcggcgcgcgggcggcggcggcgggcaccgggcaccgcggcgggcgggcagacgggcgggcatggggggagcgccgagcggccccggcggccgggccggcatcaccgcggcgtctctccgctagaggaggggacaagccagttctcctttgcagcaaaaaattacatgtatatattattaagataatatatacattggattttatttttttaaaaagtttattttgctccatttttgaaaaagagagagcttgggtggcgagcggtttttttttaaaatcaattatccttattttctgttatttgtccccgtccctccccacccccctgctgaagcgagaataagggcagggaccgcggctcctacctcttggtgatccccttccccattccgcccccgccccaacgcccagcacagtgccctgcacacagtagtcgctcaataaatgttcgtggatgatgatgatgatgatgatgaaaaaaatgcagcatcaacggcagcagcaagcggaccacgcgaacgaggcaaactatgcaagaggcaccagacttcctctttctggtgaaggaccaacttctcagccgaatagctccaagcaaactgtcctgtcttggcaagctgcaatcgatgctgctagacaggccaaggctgcccaaactatgagcacctctgcacccccacctgtaggatctctctcccaaagaaaacgtcagcaatacgccaagagcaaaaaacagggtaactcgtccaacagccgacctgcccgcgcccttttctgtttatcactcaataaccccatccgaagagcctgcattagtatagtggaatggaaaccatttgacatatttatattattggctatttttgccaattgtgtggccttagctatttacatcccattccctgaagatgattctaattcaacaaatcataacttggaaaaagtagaatatgccttcctgattatttttacagtcgagacatttttgaagattatagcgtatggattattgctacatcctaatgcttatgttaggaatggatggaatttactggattttgttatagtaatagtaggattgtttagtgtaattttggaacaattaaccaaagaaacagaaggcgggaaccactcaagcggcaaatctggaggctttgatgtcaaagccctccgtgcctttcgagtgttgcgaccacttcgactagtgtcaggagtgcccagtttacaagttgtcctgaactccattataaaagccatggttcccctccttcacatagcccttttggtattatttgtaatcataatctatgctattataggattggaactttttattggaaaaatgcacaaaacatgtttttttgctgactcagatatcgtagctgaagaggacccagctccatgtgcgttctcagggaatggacgccagtgtactgccaatggcacggaatgtaggagtggctgggttggcccgaacggaggcatcaccaactttgataactttgcctttgccatgcttactgtgtttcagtgcatcaccatggagggctggacagacgtgctctactggatgaatgatgctatgggatttgaattgccctgggtgtattttgtcagtctcgtcatctttgggtcatttttcgtactaaatcttgtacttggtgtattgagcggagaattctcaaaggaaagagagaaggcaaaagcacggggagatttccagaagctccgggagaagcagcagctggaggaggatctaaagggctacttggattggatcacccaagctgaggacatcgatccggagaatgaggaagaaggaggagaggaaggcaaacgaaatactagcatgcccaccagcgagactgagtctgtgaacacagagaacgtcagcggtgaaggcgagaaccgaggctgctgtggaagtctctgtcaagccatctcaaaatccaaactcagccgacgctggcgtcgctggaaccgattcaatcgcagaagatgtagggccgccgtgaagtctgtcacgttttactggctggttatcgtcctggtgtttctgaacaccttaaccatttcctctgagcactacaatcagccagattggttgacacagattcaagatattgccaacaaagtcctcttggctctgttcacctgcgagatgctggtaaaaatgtacagcttgggcctccaagcatatttcgtctctcttttcaaccggtttgattgcttcgtggtgtgtggtggaatcactgagacgatcttggtggaactggaaatcatgtctcccctggggatctctgtgtttcggtgtgtgcgcctcttaagaatcttcaaagtgaccaggcactggacttccctgagcaacttagtggcatccttattaaactccatgaagtccatcgcttcgctgttgcttctgctttttctcttcattatcatcttttccttgcttgggatgcagctgtttggcggcaagtttaattttgatgaaacgcaaaccaagcggagcacctttgacaatttccctcaagcacttctcacagtgttccagatcctgacaggcgaagactggaatgctgtgatgtacgatggcatcatggcttacgggggcccatcctcttcaggaatgatcgtctgcatctacttcatcatcctcttcatttgtggtaactatattctactgaatgtcttcttggccatcgctgtagacaatttggctgatgctgaaagtctgaacactgctcagaaagaagaagcggaagaaaaggagaggaaaaagattgccagaaaagagagcctagaaaataaaaagaacaacaaaccagaagtcaaccagatagccaacagtgacaacaaggttacaattgatgactatagagaagaggatgaagacaaggacccctatccgccttgcgatgtgccagtaggggaagaggaagaggaagaggaggaggatgaacctgaggttcctgccggaccccgtcctcgaaggatctcggagttgaacatgaaggaaaaaattgcccccatccctgaagggagcgctttcttcattcttagcaagaccaacccgatccgcgtaggctgccacaagctcatcaaccaccacatcttcaccaacctcatccttgtcttcatcatgctgagcagtgctgccctggccgcagaggaccccatccgcagccactccttccggaacacgatactgggttactttgactatgccttcacagccatctttactgttgagatcctgttgaagatgacaacttttggagctttcctccacaaaggggccttctgcaggaactacttcaatttgctggatatgctggtggttggggtgtctctggtgtcatttgggattcaatccagtgccatctccgttgtgaagattctgagggtcttaagggtcctgcgtcccctcagggccatcaacagagcaaaaggacttaagcacgtggtccagtgcgtcttcgtggccatccggaccatcggcaacatcatgatcgtcaccaccctcctgcagttcatgtttgcctgtatcggggtccagttgttcaaggggaagttctatcgctgtacggatgaagccaaaagtaaccctgaagaatgcaggggacttttcatcctctacaaggatggggatgttgacagtcctgtggtccgtgaacggatctggcaaaacagtgatttcaacttcgacaacgtcctctctgctatgatggcgctcttcacagtctccacgtttgagggctggcctgcgttgctgtataaagccatcgactcgaatggagagaacatcggcccaatctacaaccaccgcgtggagatctccatcttcttcatcatctacatcatcattgtagctttcttcatgatgaacatctttgtgggctttgtcatcgttacatttcaggaacaaggagaaaaagagtataagaactgtgagctggacaaaaatcagcgtcagtgtgttgaatacgccttgaaagcacgtcccttgcggagatacatccccaaaaacccctaccagtacaagttctggtacgtggtgaactcttcgcctttcgaatacatgatgtttgtcctcatcatgctcaacacactctgcttggccatgcagcactacgagcagtccaagatgttcaatgatgccatggacattctgaacatggtcttcaccggggtgttcaccgtcgagatggttttgaaagtcatcgcatttaagcctaaggggtattttagtgacgcctggaacacgtttgactccctcatcgtaatcggcagcattatagacgtggccctcagcgaagcagacccaactgaaagtgaaaatgtccctgtcccaactgctacacctgggaactctgaagagagcaatagaatctccatcacctttttccgtcttttccgagtgatgcgattggtgaagcttctcagcaggggggaaggcatccggacattgctgtggacttttattaagttctttcaggcgctcccgtatgtggccctcctcatagccatgctgttcttcatctatgcggtcattggcatgcagatgtttgggaaagttgccatgagagataacaaccagatcaataggaacaataacttccagacgtttccccaggcggtgctgctgctcttcaggtgtgcaacaggtgaggcctggcaggagatcatgctggcctgtctcccagggaagctctgtgaccctgagtcagattacaaccccggggaggagcatacatgtgggagcaactttgccattgtctatttcatcagtttttacatgctctgtgcatttctgatcatcaatctgtttgtggctgtcatcatggataatttcgactatctgacccgggactggtctattttggggcctcaccatttagatgaattcaaaagaatatggtcagaatatgaccctgaggcaaagggaaggataaaacaccttgatgtggtcactctgcttcgacgcatccagcctcccctggggtttgggaagttatgtccacacagggtagcgtgcaagagattagttgccatgaacatgcctctcaacagtgacgggacagtcatgtttaatgcaaccctgtttgctttggttcgaacggctcttaagatcaagaccgaagggaacctggagcaagctaatgaagaacttcgggctgtgataaagaaaatttggaagaaaaccagcatgaaattacttgaccaagttgtccctccagctggtgatgatgaggtaaccgtggggaagttctatgccactttcctgatacaggactactttaggaaattcaagaaacggaaagaacaaggactggtgggaaagtaccctgcgaagaacaccacaattgccctacaggcgggattaaggacactgcatgacattgggccagaaatccggcgtgctatatcgtgtgatttgcaagatgacgagcctgaggaaacaaaacgagaagaagaagatgatgtgttcaaaagaaatggtgccctgcttggaaaccatgtcaatcatgttaatagtgataggagagattcccttcagcagaccaataccacccaccgtcccctgcatgtccaaaggccttcaattccacctgcaagtgatactgagaaaccgctgtttcctccagcaggaaattcggtgtgtcataaccatcataaccataattccataggaaagcaagttcccacctcaacaaatgccaatctcaataatgccaatatgtccaaagctgcccatggaaagcggcccagcattgggaaccttgagcatgtgtctgaaaatgggcatcattcttcccacaagcatgaccgggagcctcagagaaggtccagtgtgaaaagaacccgctattatgaaacttacattaggtccgactcaggagatgaacagctcccaactatttgccgggaagacccagagatacatggctatttcagggacccccactgcttgggggagcaggagtatttcagtagtgaggaatgctacgaggatgacagctcgcccacctggagcaggcaaaactatggctactacagcagatacccaggcagaaacatcgactctgagaggccccgaggctaccatcatccccaaggattcttggaggacgatgactcgcccgtttgctatgattcacggagatctccaaggagacgcctactacctcccaccccagcatcccaccggagatcctccttcaactttgagtgcctgcgccggcagagcagccaggaagaggtcccgtcgtctcccatcttcccccatcgcacggccctgcctctgcatctaatgcagcaacagatcatggcagttgccggcctagattcaagtaaagcccagaagtactcaccgagtcactcgacccggtcgtgggccacccctccagcaacccctccctaccgggactggacaccgtgctacacccccctgatccaagtggagcagtcagaggccctggaccaggtgaacggcagcctgccgtccctgcaccgcagctcctggtacacagacgagcccgacatctcctaccggactttcacaccagccagcctgactgtccccagcagcttccggaacaaaaacagcgacaagcagaggagtgcggacagcttggtggaggcagtcctgatatccgaaggcttgggacgctatgcaagggacccaaaatttgtgtcagcaacaaaacacgaaatcgctgatgcctgtgacctcaccatcgacgagatggagagtgcagccagcaccctgcttaatgggaacgtgcgtccccgagccaacggggatgtgggccccctctcacaccggcaggactatgagctacaggactttggtcctggctacagcgacgaagagccagaccctgggagggatgaggaggacctggcggatgaaatgatatgcatcaccaccttgtagcccccagcgaggggcagactggctctggcctcaggtggggcgcaggagagccaggggaaaagtgcctcatagttaggaaagtttaggcactagttgggagtaatattcaattaattagacttttgtataagagatgtcatgcctcaagaaagccataaacctggtaggaacaggtcccaagcggttgagcctggcagagtaccatgcgctcggccccagctgcaggaaacagcaggccccgccctctcacagaggatgggtgaggaggccagacctgccctgccccattgtccagatgggcactgctgtggagtctgcttctcccatgtaccagggcaccaggcccacccaactgaaggcatggcggcggggtgcaggggaaagttaaaggtgatgacgatcatcacacctgtgtcgttacctcagccatcggtctagcatatcagtcactgggcccaacatatccatttttaaaccctttcccccaaatacactgcgtcctggttcctgtttagctgttctgaaatacggtgtgtaagtaagtcagaacccagctaccagtgattattgcgagggcaatgggacctcataaataaggttttctgtgatgtgacgccagtttacataagagaatatcac

SEQ ID NO: 2 - protein, 2161 aa, Human
MMMMMMMKKMQHQRQQQADHANEANYARGTRLPLSGEGPTSQPNSSKQTVLSWQAAIDAARQAKAAQTMSTSAPPPVGSLSQRKRQQYAKSKKQGNSSNSRPARALFCLSLNNPIRRACISIVEWKPFDIFILLAIFANCVALAIYIPFPEDDSNSTNHNLEKVEYAFLIIFTVETFLKIIAYGLLLHPNAYVRNGWNLLDFVIVIVGLFSVILEQLTKETEGGNHSSGKSGGFDVKALRAFRVLRPLRLVSGVPSLQVVLNSIIKAMVPLLHIALLVLFVIITYAIIGLELFIGKMHKTCFFADSDIVAEEDPAPCAFSGNGRQCTANGTECRSGWVGPNGGITNFDNFAFAMLTVFQCITMEGWTDVLYWMNDAMGFELPWVYFVSLVIFGSFFVLNLVLGVLSGEFSKEREKAKARGDFQKLREKQQLEEDLKGYLDWITQAEDIDPENEEEGGEEGKRNTSMPTSETESVNTENVSGEGENRGCCGSLCQAISKSKLSRRWRRWNRFNRRRCRAAVKSVTFYWLVIVLVFLNTLTISSEHYNQPDWLTQIQDIANKVLLALFTCEMLVKMYSLGLQAYFVSLFNRFDCFVVCGGITETILVELEIMSPLGISVFRCVRLLRIFKVTRHWTSLSNLVASLLNSMKSIASLLLLLFLFIIIFSLLGMQLFGGKFNFDETQTKRSTFDNFPQALLTVFQILTGEDWNAVMYDGIMAYGGPSSSGMIVCIYFIILFICGNYILLNVFLAIAVDNLADAESLNTAQKEEAEEKERKKIARKESLENKKNNKPEVNQIANSDNKVTIDDYREEDEDKDPYPPCDVPVGEEEEEEEEDEPEVPAGPRPRRISELNMKEKIAPIPEGSAFFILSKTNPIRVGCHKLINHHIFTNLILVFIMLSSAALAAEDPIRSHSFRNTILGYFDYAFTAIFTVEILLKMTTFGAFLHKGAFCRNYFNLLDMLVVGVSLVSFGIQSSAISVVKILRVLRVLRPLRAINRAKGLKHVVQCVFVAIRTIGNIMIVTTLLQFMFACIGVQLFKGKFYRCTDEAKSNPEECRGLFILYKDGDVDSPVVRERIWQNSDFNFDNVLSAMMALFTVSTFEGWPALLYKAIDSNGENIGPIYNHRVEISIFFIIYIIIVAFFMMNIFVGFVIVTFQEQGEKEYKNCELDKNQRQCVEYALKARPLRRYIPKNPYQYKFWYVVNSSPFEYMMFVLIMLNTLCLAMQHYEQSKMFNDAMDILNMVFTGVFTVEMVLKVIAFKPKGYFSDAWNTFDSLIVIGSIIDVALSEADPTESENVPVPTATPGNSEESNRISITFFRLFRVMRLVKLLSRGEGIRTLLWTFIKFFQALPYVALLIAMLFFIYAVIGMQMFGKVAMRDNNQINRNNNFQTFPQAVLLLFRCATGEAWQEIMLACLPGKLCDPESDYNPGEEHTCGSNFAIVYFISFYMLCAFLIINLFVAVIMDNFDYLTRDWSILGPHHLDEFKRIWSEYDPEAKGRIKHLDVVTLLRRIQPPLGFGKLCPHRVACKRLVAMNMPLNSDGTVMFNATLFALVRTALKIKTEGNLEQANEELRAVIKKIWKKTSMKLLDQVVPPAGDDEVTVGKFYATFLIQDYFRKFKKRKEQGLVGKYPAKNTTIALQAGLRTLHDIGPEIRRAISCDLQDDEPEETKREEEDDVFKRNGALLGNHVNHVNSDRRDSLQQTNTTHRPLHVQRPSIPPASDTEKPLFPPAGNSVCHNHHNHNSIGKQVPTSTNANLNNANMSKAAHGKRPSIGNLEHVSENGHHSSHKHDREPQRRSSVKRTRYYETYIRSDSGDEQLPTICREDPEIHGYFRDPHCLGEQEYFSSEECYEDDSSPTWSRQNYGYYSRYPGRNIDSERPRGYHHPQGFLEDDDSPVCYDSRRSPRRRLLPPTPASHRRSSFNFECLRRQSSQEEVPSSPIFPHRTALPLHLMQQQIMAVAGLDSSKAQKYSPSHSTRSWATPPATPPYRDWTPCYTPLIQVEQSEALDQVNGSLPSLHRSSWYTDEPDISYRTFTPASLTVPSSFRNKNSDKQRSADSLVEAVLISEGLGRYARDPKFVSATKHEIADACDLTIDEMESAASTLLNGNVRPRANGDVGPLSHRQDYELQDFGPGYSDEEPDPGRDEEDLADEMICITTL

SEQ ID NO: 3 - DNA, 104 bp, Human
  CDS (1)...(102)
  misc_feature (1)...(104): A 104-nucleotide alternative exon of alpha-1D
gtaaatgatgcgataggatgggaatggccatgggtgtattttgttagtctgatcatccttggctcatttttcgtccttaacctggttcttggtgtccttagtgg

SEQ ID NO: 4 - protein, 34 aa, Human
VNDAIGWEWPWVYFVSLIILGSFFVLNLVLGVLS

SEQ ID NO: 5 - DNA, 6575 bp, Human
  CDS (1)...(6492)
atggtcaatgagaatacgaggatgtacattccagaggaaaaccaccaaggttccaactatgggagcccacgccccgcccatgccaacatgaatgccaatgcggcagcggggctggcccctgagcacatccccaccccgggggctgccctgtcgtggcaggcggccatcgacgcagcccggcaggctaagctgatgggcagcgctggcaatgcgaccatctccacagtcagctccacgcagcggaagcgccagcaatatgggaaacccaagaagcagggcagcaccacggccacacgcccgccccgagccctgctctgcctgaccctgaagaaccccatccggagggcctgcatcagcattgtcgaatggaaaccatttgaaataattattttactgactatttttgccaattgtgtggccttagcgatctatattccctttccagaagatgattccaacgccaccaattccaacctggaacgagtggaatatctctttctcataatttttacggtggaagcgtttttaaaagtaatcgcctatggactcctctttcaccccaatgcctacctccgcaacggctggaacctactagattttataattgtggttgtggggctttttagtgcaattttagaacaagcaaccaaagcagatggggcaaacgctctcggagggaaaggggccggatttgatgtgaaggcgctgagggccttccgcgtgctgcgccccctgcggctggtgtccggagtcccaagtctccaggtggtcctgaattccatcatcaaggccatggtccccctgctgcacatcgccctgcttgtgctgtttgtcatcatcatctacgccatcatcggcttggagctcttcatggggaagatgcacaagacctgctacaaccaggagggcatagcagatgttccagcagaagatgacccttccccttgtgcgctggaaacgggccacgggcggcagtgccagaacggcacggtgtgcaagcccggctgggatggtcccaagcacggcatcaccaactttgacaactttgccttcgccatgctcacggtgttccagtgcatcaccatggagggctggacggacgtgctgtactgggtcaatgatgccgtaggaagggactggccctggatctattttgttacactaatcatcatagggtcattttttgtacttaacttggttctcggtgtgcttagcggagagttttccaaagagagggagaaggccaaggcccggggagatttccagaagctgcgggagaagcagcagctagaagaggatctcaaaggctacctggattggatcactcaggccgaagacatcgatcctgagaatgaggacgaaggcatggatgaggagaagccccgaaacagaggcactccggcgggcatgcttgatcagaagaaagggaagtttgcttggtttagtcactccacagaaacccatgtgagcatgcccaccagtgagaccgagtccgtcaacaccgaaaacgtggctggaggtgacatcgagggagaaaactgcggggccaggctggcccaccggatctccaagtcaaagttcagccgctactggcgccggtggaatcggttctgcagaaggaagtgccgcgccgcagtcaagtctaatgtcttctactggctggtgattttcctggtgttcctcaacacgctcaccattgcctctgagcactacaaccagcccaactggctcacagaagtccaagacacggcaaacaaggccctgctggccctgttcacggcagagatgctcctgaagatgtacagcctgggcctgcaggcctacttcgtgtccctcttcaaccgctttgactgcttcgtcgtgtgtggcggcatcctggagaccatcctggtggagaccaagatcatgtccccactgggcatctccgtgctcagatgcgtccggctgctgaggattttcaagatcacgaggtactggaactccttgagcaacctggtggcatccttgctgaactctgtgcgctccatcgcctccctgctccttctcctcttcctcttcatcatcatcttctccctcctggggatgcagctctttggaggaaagttcaactttgatgagatgcagacccggaggagcacattcgataacttcccccagtccctcctcactgtgtttcagatcctgaccggggaggactggaattcggtgatgtatgatgggatcatggcttatgggggcccctcttttccagggatgttagtctgtatttacttcatcatcctcttcatctgtggaaactatatcctactgaatgtgttcttggccattgctgtggacaacctggctgatgctgagagcctcacatctgcccaaaaggaggaggaagaggagaaggagagaaagaagctggccaggactgccagcccagagaagaaacaagagttggtggagaagccggcagtgggggaatccaaggaggagaagattgagctgaaatccatcacggctgacggagagtctccacccgccaccaagatcaacatggatgacctccagcccaatgaaaatgaggataagagcccctaccccaacccagaaactacaggagaagaggatgaggaggagccagagatgcctgtcggccctcgcccacgaccactctctgagcttcaccttaaggaaaaggcagtgcccatgccagaagccagcgcgtttttcatcttcagctctaacaacaggtttcgcctccagtgccaccgcattgtcaatgacacgatcttcaccaacctgatcctcttcttcattctgctcagcagcatttccctggctgctgaggacccggtccagcacacctccttcaggaaccatattctgttttattttgatattgtttttaccaccattttcaccattgaaattgctctgaagatgactgcttatggggctttcttgcacaagggttctttctgccggaactacttcaacatcctggacctgctggtggtcagcgtgtccctcatctcctttggcatccagtccagtgcaatcaatgtcgtgaagatcttgcgagtcctgcgagtactcaggcccctgagggccatcaacagggccaaggggctaaagcatgtggttcagtgtgtgtttgtcgccatccggaccatcgggaacatcgtgattgtcaccaccctgctgcagttcatgtttgcctgcatcggggtccagctcttcaagggaaagctgtacacctgttcagacagttccaagcagacagaggcggaatgcaagggcaactacatcacgtacaaagacggggaggttgaccaccccatcatccaaccccgcagctgggagaacagcaagtttgactttgacaatgttctggcagccatgatggccctcttcaccgtctccaccttcgaagggtggccagagctgctgtaccgctccatcgactcccacacggaagacaagggccccatctacaactaccgtgtggagatctccatcttcttcatcatctacatcatcatcatcgccttcttcatgatgaacatcttcgtgggcttcgtcatcgtcacctttcaggagcagggggagcaggagtacaagaactgtgagctggacaagaaccagcgacagtgcgtggaatacgccctcaaggcccggcccctgcggaggtacatccccaagaaccagcaccagtacaaagtgtggtacgtggtcaactccacctacttcgagtacctgatgttcgtcctcatcctgctcaacaccatctgcctggccatgcagcactacggccagagctgcctgttcaaaatcgccatgaacatcctcaacatgctcttcactggcctcttcaccgtggagatgatcctgaagctcattgccttcaaacccaagggttactttagtgatccctggaatgtttttgacttcctcatcgtaattggcagcataattgacgtcattctcagtgagactaatccagctgaacatacccaatgctctccctctatgaacgcagaggaaaactcccgcatctccatcaccttcttccgcctgttccgggtcatgcgtctggtgaagctgctgagccgtggggagggcatccggacgctgctgtggaccttcatcaagtccttccaggccctgccctatgtggccctcctgatcgtgatgctgttcttcatctacgcggtgatcgggatgcaggtgtttgggaaaattgccctgaatgataccacagagatcaaccggaacaacaactttcagaccttcccccaggccgtgctgctcctcttcaggtgtgccaccggggaggcctggcaggacatcatgctggcctgcatgccaggcaagaagtgtgccccagagtccgagcccagcaacagcacggagggtgaaacaccctgtggtagcagctttgctgtcttctacttcatcagcttctacatgctctgtgccttcctgatcatcaacctctttgtagctgtcatcatggacaactttgactacctgacaagggactggtccatccttggtccccaccacctggatgagtttaaaagaatctgggcagagtatgaccctgaagccaagggtcgtatcaaacacctggatgtggtgaccctcctccggcggattcagccgccactaggttttgggaagctgtgccctcaccgcgtggcttgcaaacgcctggtctccatgaacatgcctctgaacagcgacgggacagtcatgttcaatgccaccctgtttgccctggtcaggacggccctgaggatcaaaacagaagggaacctagaacaagccaatgaggagctgcgggcgatcatcaagaagatctggaagcggaccagcatgaagctgctggaccaggtggtgccccctgcaggtgatgatgaggtcaccgttggcaagttctacgccacgttcctgatccaggagtacttccggaagttcaagaagcgcaaagagcagggccttgtgggcaagccctcccagaggaacgcgctgtctctgcaggctggcttgcgcacactgcatgacatcgggcctgagatccgacgggccatctctggagatctcaccgctgaggaggagctggacaaggccatgaaggaggctgtgtccgctgcttctgaagatgacatcttcaggagggccggtggcctgttcggcaaccacgtcagctactaccaaagcgacggccggagcgccttcccccagaccttcaccactcagcgcccgctgcacatcaacaaggcgggcagcagccagggcgacactgagtcgccatcccacgagaagctggtggactccaccttcaccccgagcagctactcgtccaccggctccaacgccaacatcaacaacgccaacaacaccgccctgggtcgcctccctcgccccgccggctaccccagcacagtcagcactgtggagggccacgggccccccttgtcccctgccatccgggtgcaggaggtggcgtggaagctcagctccaacaggtgccactcccgggagagccaggcagccatggcgcgtcaggaggagacgtctcaggatgagacctatgaagtgaagatgaaccatgacacggaggcctgcagtgagcccagcctgctctccacagagatgctctcctaccaggatgacgaaaatcggcaactgacgctcccagaggaggacaagagggacatccggcaatctccgaagaggggtttcctccgctctgcctcactaggtcgaagggcctccttccacctggaatgtctgaagcgacagaaggaccgagggggagacatctctcagaagacagtcctgcccttgcatctggttcatcatcaggcattggcagtggcaggcctgagccccctcttccagagaagccattcccctgcctcattccctaggccttttgccaccccaccagccacacctggcagccgaggctggcccccacagcccgtccccaccctgcggcttgagggggtcgagtccagtgagaaactcaacagcagcttcccatccatccactgcggctcctgggctgagaccacccccggtggcgggggcagcagcgccgcccggagagtccggcccgtctccctcatggtgcccagccaggctggggccccagggaggcagttccacggcagtgccagcagcctggtggaagcggtcttgatttcagaaggactggggcagtttgctcaagatcccaagttcatcgaggtcaccacccaggagctggccgacgcctgcgacatgaccatagaggagatggagagcgcggccgacaacatcctcagcgggggcgccccacagagccccaatggcgccctcttaccctttgtgaactgcagggacgcggggcaggaccgagccgggggcgaagaggacgcgggctgtgtgcgcgcgcggggtcgaccgagtgaggaggagctccaggacagcagggtctacgtcagcagcctgtagtgggcgctgccagatgcgggcttttttttatttgtttcaatgttcctaatgggttcgtttcagaagtgcctcactgttctcgt

SEQ ID NO: 6 - protein, 2163 aa, Human
MVNENTRMYIPEENHQGSNYGSPRPAHANMNANAAAGLAPEHIPTPGAALSWQAAIDAARQAKLMGSAGNATISTVSSTQRKRQQYGKPKKQGSTTATRPPRALLCLTLKNPIRRACISIVEWKPFEIIILLTIFANCVALAIYIPFPEDDSNATNSNLERVEYLFLIIFTVEAFLKVIAYGLLFHPNAYLRNGWNLLDFIIVVVGLFSAILEQATKADGANALGGKGAGFDVKALRAFRVLRPLRLVSGVPSLQVVLNSIIKAMVPLLHIALLVLFVIIIYAIIGLELFMGKMHKTCYNQEGIADVPAEDDPSPCALETGHGRQCQNGTVCKPGWDGPKHGITNFDNFAFAMLTVFQCITMEGWTDVLYWVNDAVGRDWPWIYFVTLIIIGSFFVLNLVLGVLSGEFSKEREKAKARGDFQKLREKQQLEEDLKGYLDWITQAEDIDPENEDEGMDEEKPRNRGTPAGMLDQKKGKFAWFSHSTETHVSMPTSETESVNTENVAGGDIEGENCGARLAHRISKSKFSRYWRRWNRFCRRKCRAAVKSNVFYWLVIFLVFLNTLTIASEHYNQPNWLTEVQDTANKALLALFTAEMLLKMYSLGLQAYFVSLFNRFDCFVVCGGILETILVETKIMSPLGISVLRCVRLLRIFKITRYWNSLSNLVASLLNSVRSIASLLLLLFLFIIIFSLLGMQLFGGKFNFDEMQTRRSTFDNFPQSLLTVFQILTGEDWNSVMYDGIMAYGGPSFPGMLVCIYFIILFICGNYILLNVFLAIAVDNLADAESLTSAQKEEEEEKERKKLARTASPEKKQELVEKPAVGESKEEKIELKSITADGESPPATKINMDDLQPNENEDKSPYPNPETTGEEDEEEPEMPVGPRPRPLSELHLKEKAVPMPEASAFFIFSSNNRFRLQCHRIVNDTIFTNLILFFILLSSISLAAEDPVQHTSFRNHILFYFDIVFTTIFTIEIALKMTAYGAFLHKGSFCRNYFNILDLLVVSVSLISFGIQSSAINVVKILRVLRVLRPLRAINRAKGLKHVVQCVFVAIRTIGNIVIVTTLLQFMFACIGVQLFKGKLYTCSDSSKQTEAECKGNYITYKDGEVDHPIIQPRSWENSKFDFDNVLAAMMALFTVSTFEGWPELLYRSIDSHTEDKGPIYNYRVEISIFFIIYIIIIAFFMMNIFVGFVIVTFQEQGEQEYKNCELDKNQRQCVEYALKARPLRRYIPKNQHQYKVWYVVNSTYFEYLMFVLILLNTICLAMQHYGQSCLFKIAMNILNMLFTGLFTVEMILKLIAFKPKGYFSDPWNVFDFLIVIGSIIDVILSETNPAEHTQCSPSMNAEENSRISITFFRLFRVMRLVKLLSRGEGIRTLLWTFIKSFQALPYVALLIVMLFFIYAVIGMQVFGKIALNDTTEINRNNNFQTFPQAVLLLFRCATGEAWQDIMLACMPGKKCAPESEPSNSTEGETPCGSSFAVFYFISFYMLCAFLIINLFVAVIMDNFDYLTRDWSILGPHHLDEFKRIWAEYDPEAKGRIKHLDVVTLLRRIQPPLGFGKLCPHRVACKRLVSMNMPLNSDGTVMFNATLFALVRTALRIKTEGNLEQANEELRAIIKKIWKRTSMKLLDQVVPPAGDDEVTVGKFYATFLIQEYFRKFKKRKEQGLVGKPSQRNALSLQAGLRTLHDIGPEIRRAISGDLTAEEELDKAMKEAVSAASEDDIFRRAGGLFGNHVSYYQSDGRSAFPQTFTTQRPLHINKAGSSQGDTESPSHEKLVDSTFTPSSYSSTGSNANINNANNTALGRLPRPAGYPSTVSTVEGHGPPLSPAIRVQEVAWKLSSNRCHSRESQAAMARQEETSQDETYEVKMNHDTEACSEPSLLSTEMLSYQDDENRQLTLPEEDKRDIRQSPKRGFLRSASLGRRASFHLECLKRQKDRGGDISQKTVLPLHLVHHQALAVAGLSPLLQRSHSPASFPRPFATPPATPGSRGWPPQPVPTLRLEGVESSEKLNSSFPSIHCGSWAETTPGGGGSSAARRVRPVSLMVPSQAGAPGRQFHGSASSLVEAVLISEGLGQFAQDPKFIEVTTQELADACDMTIEEMESAADNILSGGAPQSPNGALLPFVNCRDAGQDRAGGEEDAGCVRARGRPSEEELQDSRVYVSSL

SEQ ID NO: 7 - DNA, 133 bp, Human
agaccacggcttcctcgaatcttgcgcgaagccgccggccatcggaggagggattaatccagacccgccggggggtgttttcacatttcttcctcttcgtggctgctcctcctattaaaaccatttttggtcc

SEQ ID NO: 8 - DNA, 89 bp, Human
cgctgagggccttccgcgtgctgcgccccctgcggctggtgtccggagtcccaagtctccaggtggtcctgaattccatcatcaaggcc

SEQ ID NO: 9 - DNA, 84 bp, Human
cactatttctgtgatgcatggaatacatttgacgccttgattgttgtgggtagcattgttgatatagcaatcaccgaggtaaac

SEQ ID NO: 10 - protein, 28 aa, Human
HYFCDAWNTFDALIVVGSIVDIAITEVN

SEQ ID NO: 11 - DNA, 7362 bp, Human
  CDS (144)...(7163)
  5'UTR (1)...(143)
  3'UTR (7161)...(7362)
gcggcggcggctgcggcggtggggccgggcgaggtccgtgcggtcccggcggctccgtggctgctccgctctgagcgcctgcgcgccccgcgccctccctgccggggccgctgggccggggatgcacgcggggcccgggagccatggtccgcttcggggacgagctgggcggccgctatggaggccccggcggcggagagcgggcccggggcggcggggccggcggggcggggggcccgggtcccggggggctgcagcccggccagcgggtcctctacaagcaatcgatcgcgcagcgcgcgcggaccatggcgctgtacaaccccatcccggtcaagcagaactgcttcaccgtcaaccgctcgctcttcgtcttcagcgaggacaacgtcgtccgcaaatacgcgaagcgcatcaccgagtggcctccattcgagaatatgatcctggccaccatcatcgccaactgcatcgtgctggccctggagcagcacctccctgatggggacaaaacgcccatgtccgagcggctggacgacacggagccctatttcatcgggatcttttgcttcgaggcagggatcaaaatcatcgctctgggctttgtcttccacaagggctcttacctgcggaacggctggaacgtcatggacttcgtggtcgtcctcacagggatccttgccacggctggaactgacttcgacctgcgaacactgagggctgtgcgtgtgctgaggcccctgaagctggtgtctgggattccaagtttgcaggtggtgctcaagtccatcatgaaggccatggttccactcctgcagattgggctgcttctcttctttgccatcctcatgtttgccatcattggcctggagttctacatgggcaagttccacaaggcctgtttccccaacagcacagatgcggagcccgtgggtgacttcccctgtggcaaggaggccccagcccggctgtgcgagggcgacactgagtgccgggagtactggccaggacccaactttggcatcaccaactttgacaatatcctgtttgccatcttgacggtgttccagtgcatcaccatggagggctggactgacatcctctataatacaaacgatgcggccggcaacacctggaactggctctacttcatccctctcatcatcatcggctccttcttcatgctcaacctggtgctgggcgtgctctcgggggagtttgccaaggagcgagagagggtggagaaccgccgcgccttcctgaagctgcgccggcagcagcagatcgagcgagagctcaacgggtacctggagtggatcttcaaggcggaggaagtcatgctggccgaggaggacaggaatgcagaggagaagtcccctttggacgtgctgaagagagcggccaccaagaagagcagaaatgacctgatccacgcagaggagggagaggaccggtttgcagatctctgtgctgttggatcccccttcgcccgcgccagcctcaagagcgggaagacagagagctcgtcatacttccggaggaaggagaagatgttccggttttttatccggcgcatggtgaaggctcagagcttctactgggtggtgctgtgcgtggtggccctgaacacactgtgtgtggccatggtgcattacaaccagccgcggcggcttaccacgaccctgtattttgcagagtttgttttcctgggtctcttcctcacagagatgtccctgaagatgtatggcctggggcccagaagctacttccggtcctccttcaactgcttcgactttggggtcatcgtggggagcgtctttgaagtggtctgggcggccatcaagccgggaagctcctttgggatcagtgtgctgcgggccctccgcctgctgaggatcttcaaagtcacgaagtactggagctccctgcggaacctggtggtgtccctgctgaactccatgaagtccatcatcagcctgctcttcttgctcttcctgttcattgtggtcttcgccctgctggggatgcagctgtttgggggacagttcaacttccaggatgagactcccacaaccaacttcgacaccttccctgccgccatcctcactgtcttccagatcctgacgggagaggactggaatgcagtgatgtatcacgggatcgaatcgcaaggcggcgtcagcaaaggcatgttctcgtccttttacttcattgtcctgacactgttcggaaactacactctgctgaatgtctttctggccatcgctgtggacaacctggccaacgcccaagagctgaccaaggatgaagaggagatggaagaagcagccaatcagaagcttgctctgcaaaaggccaaagaagtggctgaagtcagccccatgtctgccgcgaacatctccatcgccgccaggcagcagaactcggccaaggcgcgctcggtgtgggagcagcgggccagccagctacggctgcagaacctgcgggccagctgcgaggcgctgtacagcgagatggaccccgaggagcggctgcgcttcgccactacgcgccacctgcggcccgacatgaagacgcacctggaccggccgctggtggtggagctgggccgcgacggcgcgcgggggcccgtgggaggcaaagcccgacctgaggctgcggaggcccccgagggcgtcgaccctccgcgcaggcaccaccggcaccgcgacaaggacaagacccccgcggcgggggaccaggaccgagcagaggccccgaaggcggagagcggggagcccggtgcccgggaggagcggccgcggccgcaccgcagccacagcaaggaggccgcggggcccccggaggcgcggagcgagcgcggccgaggcccaggccccgagggcggccggcggcaccaccggcgcggctccccggaggaggcggccgagcgggagccccgacgccaccgcgcgcaccggcaccaggatccgagcaaggagtgcgccggcgccaagggcgagcggcgcgcgcggcaccgcggcggcccccgagcggggccccgggaggcggagagcggggaggagccggcgcggcggcaccgggcccggcacaaggcgcagcctgctcacgaggctgtggagaaggagaccacggagaaggaggccacggagaaggaggctgagatagtggaagccgacaaggaaaaggagctccggaaccaccagccccgggagccacactgtgacctggagaccagtgggactgtgactgtgggtcccatgcacacactgcccagcacctgtctccagaaggtggaggaacagccagaggatgcagacaatcagcggaacgtcactcgcatgggcagtcagcccccagacccgaacactattgtacatatcccagtgatgctgacgggccctcttggggaagccacggtcgttcccagtggtaacgtggacctggaaagccaagcagaggggaagaaggaggtggaagcggatgacgtgatgaggagcggcccccggcctatcgtcccatacagctccatgttctgtttaagccccaccaacctgctccgccgcttctgccactacatcgtgaccatgaggtacttcgaggtggtcattctcgtggtcatcgccttgagcagcatcgccctggctgctgaggacccagtgcgcacagactcgcccaggaacaacgctctgaaatacctggattacattttcactggtgtctttacctttgagatggtgataaagatgatcgacttgggactgctgcttcaccctggagcctatttccgggacttgtggaacattctggacttcattgtggtcagtggcgccctggtggcgtttgctttctcaggatccaaagggaaagacatcaataccatcaagtctctgagagtccttcgtgtcctgcggcccctcaagaccatcaaacggctgcccaagctcaaggctgtgtttgactgtgtggtgaactccctgaagaatgtcctcaacatcttgattgtctacatgctcttcatgttcatatttgccgtcattgcggtgcagctcttcaaagggaagtttttctactgcacagatgaatccaaggagctggagagggactgcaggggtcagtatttggattatgagaaggaggaagtggaagctcagcccaggcagtggaagaaatacgactttcactacgacaatgtgctctgggctctgctgacgctgttcacagtgtccacgggagaaggctggcccatggtgctgaaacactccgtggatgccacctatgaggagcagggtccaagccctgggtaccgcatggagctgtccatcttctacgtggtctactttgtggtctttcccttcttcttcgtcaacatctttgtggctttgatcatcatcaccttccaggagcagggggacaaggtgatgtctgaatgcagcctggagaagaacgagagggcttgcattgacttcgccatcagcgccaaacccctgacacggtacatgccccaaaaccggcagtcgttccagtataagacgtggacatttgtggtctccccgccctttgaatacttcatcatggccatgatagccctcaacactgtggtgctgatgatgaagttctatgatgcaccctatgagtacgagctgatgctgaaatgcctgaacatcgtgttcacatccatgttctccatggaatgcgtgctgaagatcatcgcctttggggtgctgaactatttcagagatgcctggaatgtctttgactttgtcactgtgttgggaagtattactgatattttagtaacagagattgcggaaacgaacaatttcatcaacctcagcttcctccgcctctttcgagctgcgcggctgatcaagctgctccgccagggctacaccatccgcatcctgctgtggacctttgtccagtccttcaaggccctgccctacgtgtgtctgctcattgccatgctgttcttcatctacgccatcatcggcatgcaggtgtttgggaatattgccctggatgatgacaccagcatcaaccgccacaacaacttccggacgtttttgcaagccctgatgctgctgttcaggagcgccacgggggaggcctggcacgagatcatgctgtcctgcctgagcaaccaggcctgtgatgagcaggccaatgccaccgagtgtggaagtgactttgcctacttctacttcgtctccttcatcttcctgtgctcctttctgatgttgaacctctttgtggctgtgatcatggacaattttgagtacctcacgcgggactcttccatcctaggtcctcaccacttggatgagttcatccgggtctgggctgaatacgacccggctgcgtgtgggcgcatcagttacaatgacatgtttgagatgctgaaacacatgtccccgcctctggggctggggaagaaatgccctgctcgagttgcttacaagcgcctggttcgcatgaacatgcccatctccaacgaggacatgactgttcacttcacgtccacgctgatggccctcatccggacggcactggagatcaagctggccccagctgggacaaagcagcatcagtgtgacgcggagttgaggaaggagatttccgttgtgtgggccaatctgccccagaagactttggacttgctggtaccaccccataagcctgatgagatgacagtggggaaggtttatgcagctctgatgatatttgacttctacaagcagaacaaaaccaccagagaccagatgcagcaggctcctggaggcctctcccagatgggtcctgtgtccctgttccaccctctgaaggccaccctggagcagacacagccggctgtgctccgaggagcccgggttttccttcgacagaagagttccacctccctcagcaatggcggggccatacaaaaccaagagagtggcatcaaagagtctgtctcctggggcactcaaaggacccaggatgcaccccatgaggccaggccacccctggagcgtggccactccacagagatccctgtggggcggtcaggagcactggctgtggacgttcagatgcagagcataacccggaggggccctgatggggagccccagcctgggctggagagccagggtcgagcggcctccatgccccgccttgcggccgagactcagcccgtcacagatgccagccccatgaagcgctccatctccacgctggcccagcggccccgtgggactcatctttgcagcaccaccccggaccgcccaccccctagccaggcgtcgtcgcaccaccaccaccaccgctgccaccgccgcagggacaggaagcagaggtccctggagaaggggcccagcctgtctgccgatatggatggcgcaccaagcagtgctgtggggccggggctgcccccgggagaggggcctacaggctgccggcgggaacgagagcgccggcaggagcggggccggtcccaggagcggaggcagccctcatcctcctcctcggagaagcagcgcttctactcctgcgaccgctttgggggccgtgagcccccgaagcccaagccctccctcagcagccacccaacgtcgccaacagctggccaggagccgggaccccacccacagggcagtggttccgtgaatgggagccccttgctgtcaacatctggtgctagcacccccggccgcggtgggcggaggcagctcccccagacgcccctgactccccgccccagcatcacctacaagacggccaactcctcacccatccacttcgccggggctcagaccagcctccctgccttctccccaggccggctcagccgtgggctttccgaacacaacgccctgctgcagagagaccccctcagccagcccctggcccctggctctcgaattggctctgacccttacctggggcagcgtctggacagtgaggcctctgtccacgccctgcctgaggacacgctcactttcgaggaggctgtggccaccaactcgggccgctcctccaggacttcctacgtgtcctccctgacctcccagtctcaccctctccgccgcgtgcccaacggttaccactgcaccctgggactcagctcgggtggccgagcacggcacagctaccaccaccctgaccaagaccactggtgctagctgcaccgtgaccgctcagacgcctgcatgcagcaggcgtgtgttccagtggatgagttttatcatccacacggggcagtcggccctcgggggaggccttgcccaccttggtgaggctcctgtggcccctccctccccctcctcccctcttttactctagacgacgaataaagccctgttgcttgagtgtacgtaccgc

SEQ ID NO: 12 - protein, 2339 aa, Human
MVRFGDELGGRYGGPGGGERARGGGAGGAGGPGPGGLQPGQRVLYKQSIAQRARTMALYNPIPVKQNCFTVNRSLFVFSEDNVVRKYAKRITEWPPFENMILATIIANCIVLALEQHLPDGDKTPMSERLDDTEPYFIGIFCFEAGIKIIALGFVFHKGSYLRNGWNVMDFVVVLTGILATAGTDFDLRTLRAVRVLRPLKLVSGIPSLQVVLKSIMKAMVPLLQIGLLLFFAILMFAIIGLEFYMGKFHKACFPNSTDAEPVGDFPCGKEAPARLCEGDTECREYWPGPNFGITNFDNILFAILTVFQCITMEGWTDILYNTNDAAGNTWNWLYFIPLIIIGSFFMLNLVLGVLSGEFAKERERVENRRAFLKLRRQQQIERELNGYLEWIFKAEEVMLAEEDRNAEEKSPLDVLKRAATKKSRNDLIHAEEGEDRFADLCAVGSPFARASLKSGKTESSSYFRRKEKMFRFFIRRMVKAQSFYWVVLCVVALNTLCVAMVHYNQPRRLTTTLYFAEFVFLGLFLTEMSLKMYGLGPRSYFRSSFNCFDFGVIVGSVFEVVWAAIKPGSSFGISVLRALRLLRIFKVTKYWSSLRNLVVSLLNSMKSIISLLFLLFLFIVVFALLGMQLFGGQFNFQDETPTTNFDTFPAAILTVFQILTGEDWNAVMYHGIESQGGVSKGMFSSFYFIVLTLFGNYTLLNVFLAIAVDNLANAQELTKDEEEMEEAANQKLALQKAKEVAEVSPMSAANISIAARQQNSAKARSVWEQRASQLRLQNLRASCEALYSEMDPEERLRFATTRHLRPDMKTHLDRPLVVELGRDGARGPVGGKARPEAAEAPEGVDPPRRHHRHRDKDKTPAAGDQDRAEAPKAESGEPGAREERPRPHRSHSKEAAGPPEARSERGRGPGPEGGRRHHRRGSPEEAAEREPRRHRAHRHQDPSKECAGAKGERRARHRGGPRAGPREAESGEEPARRHRARHKAQPAHEAVEKETTEKEATEKEAEIVEADKEKELRNHQPREPHCDLETSGTVTVGPMHTLPSTCLQKVEEQPEDADNQRNVTRMGSQPPDPNTIVHIPVMLTGPLGEATVVPSGNVDLESQAEGKKEVEADDVMRSGPRPIVPYSSMFCLSPTNLLRRFCHYIVTMRYFEVVILVVIALSSIALAAEDPVRTDSPRNNALKYLDYIFTGVFTFEMVIKMIDLGLLLHPGAYFRDLWNILDFIVVSGALVAFAFSGSKGKDINTIKSLRVLRVLRPLKTIKRLPKLKAVFDCVVNSLKNVLNILIVYMLFMFIFAVIAVQLFKGKFFYCTDESKELERDCRGQYLDYEKEEVEAQPRQWKKYDFHYDNVLWALLTLFTVSTGEGWPMVLKHSVDATYEEQGPSPGYRMELSIFYVVYFVVFPFFFVNIFVALIIITFQEQGDKVMSECSLEKNERACIDFAISAKPLTRYMPQNRQSFQYKTWTFVVSPPFEYFIMAMIALNTVVLMMKFYDAPYEYELMLKCLNIVFTSMFSMECVLKIIAFGVLNYFRDAWNVFDFVTVLGSITDILVTEIAETNNFINLSFLRLFRAARLIKLLRQGYTIRILLWTFVQSFKALPYVCLLIAMLFFIYAIIGMQVFGNIALDDDTSINRHNNFRTFLQALMLLFRSATGEAWHEIMLSCLSNQACDEQANATECGSDFAYFYFVSFIFLCSFLMLNLFVAVIMDNFEYLTRDSSILGPHHLDEFIRVWAEYDPAACGRISYNDMFEMLKHMSPPLGLGKKCPARVAYKRLVRMNMPISNEDMTVHFTSTLMALIRTALEIKLAPAGTKQHQCDAELRKEISVVWANLPQKTLDLLVPPHKPDEMTVGKVYAALMIFDFYKQNKTTRDQMQQAPGGLSQMGPVSLFHPLKATLEQTQPAVLRGARVFLRQKSSTSLSNGGAIQNQESGIKESVSWGTQRTQDAPHEARPPLERGHSTEIPVGRSGALAVDVQMQSITRRGPDGEPQPGLESQGRAASMPRLAAETQPVTDASPMKRSISTLAQRPRGTHLCSTTPDRPPPSQASSHHHHHRCHRRRDRKQRSLEKGPSLSADMDGAPSSAVGPGLPPGEGPTGCRRERERRQERGRSQERRQPSSSSSEKQRFYSCDRFGGREPPKPKPSLSSHPTSPTAGQEPGPHPQGSGSVNGSPLLSTSGASTPGRGGRRQLPQTPLTPRPSITYKTANSSPIHFAGAQTSLPAFSPGRLSRGLSEHNALLQRDPLSQPLAPGSRIGSDPYLGQRLDSEASVHALPEDTLTFEEAVATNSGRSSRTSYVSSLTSQSHPLRRVPNGYHCTLGLSSGGRARHSYHHPDQDHWC

SEQ ID NO: 13 - DNA, 7175 bp, Human
  CDS (144)...(6857)
  5'UTR (1)...(143)
  3'UTR (6855)...(7175)
gcggcggcggctgcggcggtggggccgggcgaggtccgtgcggtcccggcggctccgtggctgctccgctctgagcgcctgcgcgccccgcgccctccctgccggggccgctgggccggggatgcacgcggggcccgggagccatggtccgcttcggggacgagctgggcggccgctatggaggccccggcggcggagagcgggcccggggcggcggggccggcggggcggggggcccgggtcccggggggctgcagcccggccagcgggtcctctacaagcaatcgatcgcgcagcgcgcgcggaccatggcgctgtacaaccccatcccggtcaagcagaactgcttcaccgtcaaccgctcgctcttcgtcttcagcgaggacaacgtcgtccgcaaatacgcgaagcgcatcaccgagtggcctccattcgagaatatgatcctggccaccatcatcgccaactgcatcgtgctggccctggagcagcacctccctgatggggacaaaacgcccatgtccgagcggctggacgacacggagccctatttcatcgggatcttttgcttcgaggcagggatcaaaatcatcgctctgggctttgtcttccacaagggctcttacctgcggaacggctggaacgtcatggacttcgtggtcgtcctcacagggatccttgccacggctggaactgacttcgacctgcgaacactgagggctgtgcgtgtgctgaggcccctgaagctggtgtctgggattccaagtttgcaggtggtgctcaagtccatcatgaaggccatggttccactcctgcagattgggctgcttctcttctttgccatcctcatgtttgccatcattggcctggagttctacatgggcaagttccacaaggcctgtttccccaacagcacagatgcggagcccgtgggtgacttcccctgtggcaaggaggccccagcccggctgtgcgagggcgacactgagtgccgggagtactggccaggacccaactttggcatcaccaactttgacaatatcctgtttgccatcttgacggtgttccagtgcatcaccatggagggctggactgacatcctctataatacaaacgatgcggccggcaacacctggaactggctctacttcatccctctcatcatcatcggctccttcttcatgctcaacctggtgctgggcgtgctctcgggggagtttgccaaggagcgagagagggtggagaaccgccgcgccttcctgaagctgcgccggcagcagcagatcgagcgagagctcaacgggtacctggagtggatcttcaaggcggaggaagtcatgctggccgaggaggacaggaatgcagaggagaagtcccctttggacgtgctgaagagagcggccaccaagaagagcagaaatgacctgatccacgcagaggagggagaggaccggtttgcagatctctgtgctgttggatcccccttcgcccgcgccagcctcaagagcgggaagacagagagctcgtcatacttccggaggaaggagaagatgttccggttttttatccggcgcatggtgaaggctcagagcttctactgggtggtgctgtgcgtggtggccctgaacacactgtgtgtggccatggtgcattacaaccagccgcggcggcttaccacgaccctgtattttgcagagtttgttttcctgggtctcttcctcacagagatgtccctgaagatgtatggcctggggcccagaagctacttccggtcctccttcaactgcttcgactttggggtcatcgtggggagcgtctttgaagtggtctgggcggccatcaagccgggaagctcctttgggatcagtgtgctgcgggccctccgcctgctgaggatcttcaaagtcacgaagtactggagctccctgcggaacctggtggtgtccctgctgaactccatgaagtccatcatcagcctgctcttcttgctcttcctgttcattgtggtcttcgccctgctggggatgcagctgtttgggggacagttcaacttccaggatgagactcccacaaccaacttcgacaccttccctgccgccatcctcactgtcttccagatcctgacgggagaggactggaatgcagtgatgtatcacgggatcgaatcgcaaggcggcgtcagcaaaggcatgttctcgtccttttacttcattgtcctgacactgttcggaaactacactctgctgaatgtctttctggccatcgctgtggacaacctggccaacgcccaagagctgaccaaggatgaagaggagatggaagaagcagccaatcagaagcttgctctgcaaaaggccaaagaagtggctgaagtcagccccatgtctgccgcgaacatctccatcgccgccaggcagcagaactcggccaaggcgcgctcggtgtgggagcagcgggccagccagctacggctgcagaacctgcgggccagctgcgaggcgctgtacagcgagatggaccccgaggagcggctgcgcttcgccactacgcgccacctgcggcccgacatgaagacgcacctggaccggccgctggtggtggagctgggccgcgacggcgcgcgggggcccgtgggaggcaaagcccgacctgaggctgcggaggcccccgagggcgtcgaccctccgcgcaggcaccaccggcaccgcgacaaggacaagacccccgcggcgggggaccaggaccgagcagaggccccgaaggcggagagcggggagcccggtgcccgggaggagcggccgcggccgcaccgcagccacagcaaggaggccgcggggcccccggaggcgcggagcgagcgcggccgaggcccaggccccgagggcggccggcggcaccaccggcgcggctccccggaggaggcggccgagcgggagccccgacgccaccgcgcgcaccggcaccaggatccgagcaaggagtgcgccggcgccaagggcgagcggcgcgcgcggcaccgcggcggcccccgagcggggccccgggaggcggagagcggggaggagccggcgcggcggcaccgggcccggcacaaggcgcagcctgctcacgaggctgtggagaaggagaccacggagaaggaggccacggagaaggaggctgagatagtggaagccgacaaggaaaaggagctccggaaccaccagccccgggagccacactgtgacctggagaccagtgggactgtgactgtgggtcccatgcacacactgcccagcacctgtctccagaaggtggaggaacagccagaggatgcagacaatcagcggaacgtcactcgcatgggcagtcagcccccagacccgaacactattgtacatatcccagtgatgctgacgggccctcttggggaagccacggtcgttcccagtggtaacgtggacctggaaagccaagcagaggggaagaaggaggtggaagcggatgacgtgatgaggagcggcccccggcctatcgtcccatacagctccatgttctgtttaagccccaccaacctgctccgccgcttctgccactacatcgtgaccatgaggtacttcgaggtggtcattctcgtggtcatcgccttgagcagcatcgccctggctgctgaggacccagtgcgcacagactcgcccaggaacaacgctctgaaatacctggattacattttcactggtgtctttacctttgagatggtgataaagatgatcgacttgggactgctgcttcaccctggagcctatttccgggacttgtggaacattctggacttcattgtggtcagtggcgccctggtggcgtttgctttctcaggatccaaagggaaagacatcaataccatcaagtctctgagagtccttcgtgtcctgcggcccctcaagaccatcaaacggctgcccaagctcaaggctgtgtttgactgtgtggtgaactccctgaagaatgtcctcaacatcttgattgtctacatgctcttcatgttcatatttgccgtcattgcggtgcagctcttcaaagggaagtttttctactgcacagatgaatccaaggagctggagagggactgcaggggtcagtatttggattatgagaaggaggaagtggaagctcagcccaggcagtggaagaaatacgactttcactacgacaatgtgctctgggctctgctgacgctgttcacagtgtccacgggagaaggctggcccatggtgctgaaacactccgtggatgccacctatgaggagcagggtccaagccctgggtaccgcatggagctgtccatcttctacgtggtctactttgtggtctttcccttcttcttcgtcaacatctttgtggctttgatcatcatcaccttccaggagcagggggacaaggtgatgtctgaatgcagcctggagaagaacgagagggcttgcattgacttcgccatcagcgccaaacccctgacacggtacatgccccaaaaccggcagtcgttccagtataagacgtggacatttgtggtctccccgccctttgaatacttcatcatggccatgatagccctcaacactgtggtgctgatgatgaagttctatgatgcaccctatgagtacgagctgatgctgaaatgcctgaacatcgtgttcacatccatgttctccatggaatgcgtgctgaagatcatcgcctttggggtgctgaactatttcagagatgcctggaatgtctttgactttgtcactgtgttgggaagtattactgatattttagtaacagagattgcggaaacgaacaatttcatcaacctcagcttcctccgcctctttcgagctgcgcggctgatcaagctgctccgccagggctacaccatccgcatcctgctgtggacctttgtccagtccttcaaggccctgccctacgtgtgtctgctcattgccatgctgttcttcatctacgccatcatcggcatgcaggtgtttgggaatattgccctggatgatgacaccagcatcaaccgccacaacaacttccggacgtttttgcaagccctgatgctgctgttcaggagcgccacgggggaggcctggcacgagatcatgctgtcctgcctgagcaaccaggcctgtgatgagcaggccaatgccaccgagtgtggaagtgactttgcctacttctacttcgtctccttcatcttcctgtgctcctttctgatgttgaacctctttgtggctgtgatcatggacaattttgagtacctcacgcgggactcttccatcctaggtcctcaccacttggatgagttcatccgggtctgggctgaatacgacccggctgcgtgtgggcgcatcagttacaatgacatgtttgagatgctgaaacacatgtccccgcctctggggctggggaagaaatgccctgctcgagttgcttacaagcgcctggttcgcatgaacatgcccatctccaacgaggacatgactgttcacttcacgtccacgctgatggccctcatccggacggcactggagatcaagctggccccagctgggacaaagcagcatcagtgtgacgcggagttgaggaaggagatttccgttgtgtgggccaatctgccccagaagactttggacttgctggtaccaccccataagcctgatgagatgacagtggggaaggtttatgcagctctgatgatatttgacttctacaagcagaacaaaaccaccagagaccagatgcagcaggctcctggaggcctctcccagatgggtcctgtgtccctgttccaccctctgaaggccaccctggagcagacacagccggctgtgctccgaggagcccgggttttccttcgacagaagagttccacctccctcagcaatggcggggccatacaaaaccaagagagtggcatcaaagagtctgtctcctggggcactcaaaggacccaggatgcaccccatgaggccaggccacccctggagcgtggccactccacagagatccctgtggggcggtcaggagcactggctgtggacgttcagatgcagagcataacccggaggggccctgatggggagccccagcctgggctggagagccagggtcgagcggcctccatgccccgccttgcggccgagactcagcccgtcacagatgccagccccatgaagcgctccatctccacgctggcccagcggccccgtgggactcatctttgcagcaccaccccggaccgcccaccccctagccaggcgtcgtcgcaccaccaccaccaccgctgccaccgccgcagggacaggaagcagaggtccctggagaaggggcccagcctgtctgccgatatggatggcgcaccaagcagtgctgtggggccggggctgcccccgggagaggggcctacaggctgccggcgggaacgagagcgccggcaggagcggggccggtcccaggagcggaggcagccctcatcctcctcctcggagaagcagcgcttctactcctgcgaccgctttgggggccgtgagcccccgaagcccaagccctccctcagcagccacccaacgtcgccaacagctggccaggagccgggaccccacccacaggccggctcagccgtgggctttccgaacacaacgccctgctgcagagagaccccctcagccagcccctggcccctggctctcgaattggctctgacccttacctggggcagcgtctggacagtgaggcctctgtccacgccctgcctgaggacacgctcactttcgaggaggctgtggccaccaactcgggccgctcctccaggacttcctacgtgtcctccctgacctcccagtctcaccctctccgccgcgtgcccaacggttaccactgcaccctgggactcagctcgggtggccgagcacggcacagctaccaccaccctgaccaagaccactggtgctagctgcaccgtgaccgctcagacgcctgcatgcagcaggcgtgtgttccagtggatgagttttatcatccacacggggcagtcggccctcgggggaggccttgcccaccttggtgaggctcctgtggcccctccctccccctcctcccctcttttactctagacgacgaataaagccctgttgcttgagtgtacgtaccgc

SEQ ID NO: 14 - protein, 2237 aa, Human
MVRFGDELGGRYGGPGGGERARGGGAGGAGGPGPGGLQPGQRVLYKQSIAQRARTMALYNPIPVKQNCFTVNRSLFVFSEDNVVRKYAKRITEWPPFENMILATIIANCIVLALEQHLPDGDKTPMSERLDDTEPYFIGIFCFEAGIKIIALGFVFHKGSYLRNGWNVMDFVVVLTGILATAGTDFDLRTLRAVRVLRPLKLVSGIPSLQVVLKSIMKAMVPLLQIGLLLFFAILMFAIIGLEFYMGKFHKACFPNSTDAEPVGDFPCGKEAPARLCEGDTECREYWPGPNFGITNFDNILFAILTVFQCITMEGWTDILYNTNDAAGNTWNWLYFIPLIIIGSFFMLNLVLGVLSGEFAKERERVENRRAFLKLRRQQQIERELNGYLEWIFKAEEVMLAEEDRNAEEKSPLDVLKRAATKKSRNDLIHAEEGEDRFADLCAVGSPFARASLKSGKTESSSYFRRKEKMFRFFIRRMVKAQSFYWVVLCVVALNTLCVAMVHYNQPRRLTTTLYFAEFVFLGLFLTEMSLKMYGLGPRSYFRSSFNCFDFGVIVGSVFEVVWAAIKPGSSFGISVLRALRLLRIFKVTKYWSSLRNLVVSLLNSMKSIISLLFLLFLFIVVFALLGMQLFGGQFNFQDETPTTNFDTFPAAILTVFQILTGEDWNAVMYHGIESQGGVSKGMFSSFYFIVLTLFGNYTLLNVFLAIAVDNLANAQELTKDEEEMEEAANQKLALQKAKEVAEVSPMSAANISIAARQQNSAKARSVWEQRASQLRLQNLRASCEALYSEMDPEERLRFATTRHLRPDMKTHLDRPLVVELGRDGARGPVGGKARPEAAEAPEGVDPPRRHHRHRDKDKTPAAGDQDRAEAPKAESGEPGAREERPRPHRSHSKEAAGPPEARSERGRGPGPEGGRRHHRRGSPEEAAEREPRRHRAHRHQDPSKECAGAKGERRARHRGGPRAGPREAESGEEPARRHRARHKAQPAHEAVEKETTEKEATEKEAEIVEADKEKELRNHQPREPHCDLETSGTVTVGPMHTLPSTCLQKVEEQPEDADNQRNVTRMGSQPPDPNTIVHIPVMLTGPLGEATVVPSGNVDLESQAEGKKEVEADDVMRSGPRPIVPYSSMFCLSPTNLLRRFCHYIVTMRYFEVVILVVIALSSIALAAEDPVRTDSPRNNALKYLDYIFTGVFTFEMVIKMIDLGLLLHPGAYFRDLWNILDFIVVSGALVAFAFSGSKGKDINTIKSLRVLRVLRPLKTIKRLPKLKAVFDCVVNSLKNVLNILIVYMLFMFIFAVIAVQLFKGKFFYCTDESKELERDCRGQYLDYEKEEVEAQPRQWKKYDFHYDNVLWALLTLFTVSTGEGWPMVLKHSVDATYEEQGPSPGYRMELSIFYVVYFVVFPFFFVNIFVALIIITFQEQGDKVMSECSLEKNERACIDFAISAKPLTRYMPQNRQSFQYKTWTFVVSPPFEYFIMAMIALNTVVLMMKFYDAPYEYELMLKCLNIVFTSMFSMECVLKIIAFGVLNYFRDAWNVFDFVTVLGSITDILVTEIAETNNFINLSFLRLFRAARLIKLLRQGYTIRILLWTFVQSFKALPYVCLLIAMLFFIYAIIGMQVFGNIALDDDTSINRHNNFRTFLQALMLLFRSATGEAWHEIMLSCLSNQACDEQANATECGSDFAYFYFVSFIFLCSFLMLNLFVAVIMDNFEYLTRDSSILGPHHLDEFIRVWAEYDPAACGRISYNDMFEMLKHMSPPLGLGKKCPARVAYKRLVRMNMPISNEDMTVHFTSTLMALIRTALEIKLAPAGTKQHQCDAELRKEISVVWANLPQKTLDLLVPPHKPDEMTVGKVYAALMIFDFYKQNKTTRDQMQQAPGGLSQMGPVSLFHPLKATLEQTQPAVLRGARVFLRQKSSTSLSNGGAIQNQESGIKESVSWGTQRTQDAPHEARPPLERGHSTEIPVGRSGALAVDVQMQSITRRGPDGEPQPGLESQGRAASMPRLAAETQPVTDASPMKRSISTLAQRPRGTHLCSTTPDRPPPSQASSHHHHHRCHRRRDRKQRSLEKGPSLSADMDGAPSSAVGPGLPPGEGPTGCRRERERRQERGRSQERRQPSSSSSEKQRFYSCDRFGGREPPKPKPSLSSHPTSPTAGQEPGPHPQAGSAVGFPNTTPCCRETPSASPWPLALELALTLTWGSVWTVRPLSTPCLRTRSLSRRLWPPTRAAPPGLPTCPP

SEQ ID NO: 15 - DNA, 1546 bp, Human
  CDS (1)...(1437)
  3'UTR (1435)...(1546)
atggtccagaagaccagcatgtcccggggcccttacccaccctcccaggagatccccatggaggtcttcgaccccagcccgcagggcaaatacagcaagaggaaagggcgattcaaacggtcagatgggagcacgtcctcggataccacatccaacagctttgtccgccagggctcagcggagtcctacaccagccgtccatcagactctgatgtatctctggaggaggaccgggaagccttaaggaaggaagcagagcgccaggcattagcgcagctcgagaaggccaagaccaagccagtggcatttgctgtgcggacaaatgttggctacaatccgtctccaggggatgaggtgcctgtgcagggagtggccatcaccttcgagcccaaagacttcctgcacatcaaggagaaatacaataatgactggtggatcgggcggctggtgaaggagggctgtgaggttggcttcattcccagccccgtcaaactggacagccttcgcctgctgcaggaacagaagctgcgccagaaccgcctcggctccagcaaatcaggcgataactccagttccagtctgggagatgtggtgactggcacccgccgccccacaccccctgccagtgccaaacagaagcagaagtcgacagagcatgtgcccccctatgacgtggtgccttccatgaggcccatcatcctggtgggaccgtcgctcaagggctacgaggttacagacatgatgcagaaagctttatttgacttcttgaagcatcggtttgatggcaggatctccatcactcgtgtgacggcagatatttccctggctaagcgctcagttctcaacaaccccagcaaacacatcatcattgagcgctccaacacacgctccagcctggctgaggtgcagagtgaaatcgagcgaatcttcgagctggcccggacccttcagttggtcgctctggatgctgacaccatcaatcacccagcccagctgtccaagacctcgctggcccccatcattgtttacatcaagatcacctctcccaaggtacttcaaaggctcatcaagtcccgaggaaagtctcagtccaaacacctcaatgtccaaatagcggcctcggaaaagctggcacagtgcccccctgaaatgtttgacatcatcctggatgagaaccaattggaggatgcctgcgagcatctggcggagtacttggaagcctattggaaggccacacacccgcccagcagcacgccacccaatccgctgctgaaccgcaccatggctaccgcagccctggctgccagccctgcccctgtctccaacctccaggtacaggtgctcacctcgctcaggagaaacctcggcttctggggcgggctggagtcctcacagcggggcagtgtggtgccccaggagcaggaacatgccatgtagtgggcgccctgcccgtcttccctcctgctctggggtcggaactggagtgcagggaacatggaggaggaagggaagagctttattttgtaaaaaaataagatgagcggca

SEQ ID NO: 16 - protein, 478 aa, Human
MVQKTSMSRGPYPPSQEIPMEVFDPSPQGKYSKRKGRFKRSDGSTSSDTTSNSFVRQGSAESYTSRPSDSDVSLEEDREALRKEAERQALAQLEKAKTKPVAFAVRTNVGYNPSPGDEVPVQGVAITFEPKDFLHIKEKYNNDWWIGRLVKEGCEVGFIPSPVKLDSLRLLQEQKLRQNRLGSSKSGDNSSSSLGDVVTGTRRPTPPASAKQKQKSTEHVPPYDVVPSMRPIILVGPSLKGYEVTDMMQKALFDFLKHRFDGRISITRVTADISLAKRSVLNNPSKHIIIERSNTRSSLAEVQSEIERIFELARTLQLVALDADTINHPAQLSKTSLAPIIVYIKITSPKVLQRLIKSRGKSQSKHLNVQIAASEKLAQCPPEMFDIILDENQLEDACEHLAEYLEAYWKATHPPSSTPPNPLLNRTMATAALAASPAPVSNLQVQVLTSLRRNLGFWGGLGSSQRGSVVPQEQEHAM

SEQ ID NO: 17 - DNA, 1851 bp, Human
  CDS (1)...(1797): standard name = Beta1-3
  3'UTR (1795)...(1851)
atggtccagaagaccagcatgtcccggggcccttacccaccctcccaggagatccccatgggagtcttcgaccccagcccgcagggcaaatacagcaagaggaaagggcgattcaaacggtcagatgggagcacgtcctcggataccacatccaacagctttgtccgccagggctcagcggagtcctacaccagccgtccatcagactctgatgtatctctggaggaggaccgggaagccttaaggaaggaagcagagcgccaggcattagcgcagctcgagaaggccaagaccaagccagtggcatttgctgtgcggacaaatgttggctacaatccgtctccaggggatgaggtgcctgtgcagggagtggccatcaccttcgagcccaaagacttcctgcacatcaaggagaaatacaataatgactggtggatcgggcggctggtgaaggagggctgtgaggttggcttcattcccagccccgtcaaactggacagccttcgcctgctgcaggaacagaagctgcgccagaaccgcctcggctccagcaaatcaggcgataactccagttccagtctgggagatgtggtgactggcacccgccgccccacaccccctgccagtgccaaacagaagcagaagtcgacagagcatgtgcccccctatgacgtggtgccttccatgaggcccatcatcctggtgggaccgtcgctcaagggctacgaggttacagacatgatgcagaaagctttatttgacttcttgaagcatcggtttgatggcaggatctccatcactcgtgtgacggcagatatttccctggctaagcgctcagttctcaacaaccccagcaaacacatcatcattgagcgctccaacacacgctccagcctggctgaggtgcagagtgaaatcgagcgaatcttcgagctggcccggacccttcagttggtcgctctggatgctgacaccatcaatcacccagcccagctgtccaagacctcgctggcccccatcattgtttacatcaagatcacctctcccaaggtacttcaaaggctcatcaagtcccgaggaaagtctcagtccaaacacctcaatgtccaaatagcggcctcggaaaagctggcacagtgcccccctgaaatgtttgacatcatcctggatgagaaccaattggaggatgcctgcgagcatctggcggagtacttggaagcctattggaaggccacacacccgcccagcagcacgccacccaatccgctgctgaaccgcaccatggctaccgcagccctggctgccagccctgcccctgtctccaacctccagggaccctaccttgcttccggggaccagccactggaacgggccaccggggagcacgccagcatgcacgagtacccaggggagctgggccagcccccaggcctttaccccagcagccacccaccaggccgggcaggcacgctacgggcactgtcccgccaagacacttttgatgccgacacccccggcagccgaaactctgcctacacggagctgggagactcatgtgtggacatggagactgacccctcagaggggccagggcttggagaccctgcagggggcggcacgcccccagcccgacagggatcctgggaggacgaggaagaagactatgaggaagagctgaccgacaaccggaaccggggccggaataaggcccgctactgcgctgagggtgggggtccagttttggggcgcaacaagaatgagctggagggctggggacgaggcgtctacattcgctgagaggcaggggccacacggcgggaggaagggctctgagcccaggggaggggaggg

SEQ ID NO: 18 - protein, 598 aa, Human
MVQKTSMSRGPYPPSQEIPMGVFDPSPQGKYSKRKGRFKRSDGSTSSDTTSNSFVRQGSAESYTSRPSDSDVSLEEDREALRKEAERQALAQLEKAKTKPVAFAVRTNVGYNPSPGDEVPVQGVAITFEPKDFLHIKEKYNNDWWIGRLVKEGCEVGFIPSPVKLDSLRLLQEQKLRQNRLGSSKSGDNSSSSLGDVVTGTRRPTPPASAKQKQKSTEHVPPYDVVPSMRPIILVGPSLKGYEVTDMMQKALFDFLKHRFDGRISITRVTADISLAKRSVLNNPSKHIIIERSNTRSSLAEVQSEIERIFELARTLQLVALDADTINHPAQLSKTSLAPIIVYIKITSPKVLQRLIKSRGKSQSKHLNVQIAASEKLAQCPPEMFDIILDENQLEDACEHLAEYLEAYWKATHPPSSTPPNPLLNRTMATAALAASPAPVSNLQGPYLASGDQPLERATGEHASMHEYPGELGQPPGLYPSSHPPGRAGTLRALSRQDTFDADTPGSRNSAYTELGDSCVDMETDPSEGPGLGDPAGGGTPPARQGSWEDEEEDYEEELTDNRNRGRNKARYCAEGGGPVLGRNKNELEGWGRGVYIR

SEQ ID NO: 19 - DNA, 3600 bp, Human
  CDS (35)...(3310): standard names = Alpha-2
  5'UTR (1)...(34)
  3'UTR (3308)...(3600)
gcgggggagggggcattgatcttcgatcgcgaagatggctgctggctgcctgctggccttgactctgacacttttccaatctttgctcatcggcccctcgtcggaggagccgttcccttcggccgtcactatcaaatcatgggtggataagatgcaagaagaccttgtcacactggcaaaaacagcaagtggagtcaatcagcttgttgatatttatgagaaatatcaagatttgtatactgtggaaccaaataatgcacgccagctggtagaaattgcagccagggatattgagaaacttctgagcaacagatctaaagccctggtgagcctggcattggaagcggagaaagttcaagcagctcaccagtggagagaagattttgcaagcaatgaagttgtctactacaatgcaaaggatgatctcgatcctgagaaaaatgacagtgagccaggcagccagaggataaaacctgttttcattgaagatgctaattttggacgacaaatatcttatcagcacgcagcagtccatattcctactgacatctatgagggctcaacaattgtgttaaatgaactcaactggacaagtgccttagatgaagttttcaaaaagaatcgcgaggaagacccttcattattgtggcaggtttttggcagtgccactggcctagctcgatattatccagcttcaccatgggttgataatagtagaactccaggagctgcatctcctaaagacatgcttattctggtggatgtgagtggaagtgttagtggattgacacttaaactgatccgaacatctgtctccgaaatgttagaaaccctctcagatgatgatttcgtgaatgtagcttcatttaacagcaatgctcaggatgtaagctgttttcagcaccttgtccaagcaaatgtaagaaataaaaaagtgttgaaagacgcggtgaataatatcacagccaaaggaattacagattataagaagggctttagttttgcttttgaacagctgcttaattataatgtttccagagcaaactgcaataagattattatgctattcacggatggaggagaagagagagcccaggagatatttaacaaatacaataaagataaaaaagtacgtgtattcaggttttcagttggtcaacacaattatgagagaggacctattcagtggatggcctgtgaaaacaataagattgacctttatgatgtacgcagaagaccatggtacatccaaaaaggttattattatgaaattccttccattggtgcaataagaatcaatactcaggaatatttggatgttttgggaagaccaatggttttagcaggagacaaagctaagcaagtccaatggacaaatgtgtacctggatgcattggaactgggacttgtcattactggaactcttccggtcttcaacataaccggccaatttgaaaataagacaaacttaaagaaccagctgattcttggtgtgatgggagtagatgtgtctttggaagatattaaaagactgacaccacgttttacactgtgccccaatgggtattactttgcaatcgatcctaatggttatgttttattacatccaaatcttcagccaaagaaccccaaatctcaggagccagtaacattggatttccttgatgcagagttagagaatgatattaaagtggagattcgaaataagatgattgatggggaaagtggagaaaaaacattcagaactctggttaaatctcaagatgagagatatattgacaaaggaaacaggacatacacatggacacctgtcaatggcacagattacagtttggccttggtattaccaacctacagtttttactatataaaagccaaactagaagagacaataactcaggccagatcaaaaaagggcaaaatgaaggattcggaaaccctgaagccagataattttgaagaatctggctatacattcatagcaccaagagattactgcaatgacctgaaaatatcggataataacactgaatttcttttaaatttcaacgagtttattgatagaaaaactccaaacaacccatcatgtaacgcggatttgattaatagagtcttgcttgatgcaggctttacaaatgaacttgtccaaaattactggagtaagcagaaaaatatcaagggagtgaaagcacgatttgttgtgactgatggtgggattaccagagtttatcccaaagaggctggagaaaattggcaagaaaacccagagacatatgaggacagcttctataaaaggagcctagataatgataactatgttttcactgctccctactttaacaaaagtggacctggtgcctatgaatcgggcattatggtaagcaaagctgtagaaatatatattcaagggaaacttcttaaacctgcagttgttggaattaaaattgatgtaaattcctggatagagaatttcaccaaaacctcaatcagagatccgtgtgctggtccagtttgtgactgcaaaagaaacagtgacgtaatggattgtgtgattctggatgatggtgggtttcttctgatggcaaatcatgatgattatactaatcagattggaagattttttggagagattgatcccagcttgatgagacacctggttaatatatcagtttatgcttttaacaaatcttatgattatcagtcagtatgtgagcccggtgctgcaccaaaacaaggagcaggacatcgctcagcatatgtgccatcagtagcagacatattacaaattggctggtgggccactgctgctgcctggtctattctacagcagtttctcttgagtttgacctttccacgactccttgaggcagttgagatggaggatgatgacttcacggcctccctgtccaagcagagctgcattactgaacaaacccagtatttcttcgataacgacagtaaatcattcagtggtgtattagactgtggaaactgttccagaatctttcatggagaaaagcttatgaacaccaacttaatattcataatggttgagagcaaagggacatgtccatgtgacacacgactgctcatacaagcggagcagacttctgacggtccaaatccttgtgacatggttaagcaacctagataccgaaaagggcctgatgtctgctttgataacaatgtcttggaggattatactgactgtggtggtgtttctggattaaatccctccctgtggtatatcattggaatccagtttctactactttggctggtatctggcagcacacaccggctgttatgaccttctaaaaaccaaatctgcatagttaaactccagaccctgccaaaacatgagccctgccctcaattacagtaacgtagggtcagctataaaatcagacaaacattagctgggcctgttccatggcataacactaaggcgcagactcctaaggcacccactggctgcatgtcagggtgtcagatccttaaacgtgtgtgaatgctgcatcatctatgtgtaacatcaaagcaaaatcctatacgtgtcctctattggaaaatttgggcgtttgttgttgcattgttggt

SEQ ID NO: 20 - protein, 1091 aa, Human
MAAGCLLALTLTLFQSLLIGPSSEEPFPSAVTIKSWVDKMQEDLVTLAKTASGVNQLVDIYEKYQDLYTVEPNNARQLVEIAARDIEKLLSNRSKALVSLALEAEKVQAAHQWREDFASNEVVYYNAKDDLDPEKNDSEPGSQRIKPVFIEDANFGRQISYQHAAVHIPTDIYEGSTIVLNELNWTSALDEVFKKNREEDPSLLWQVFGSATGLARYYPASPWVDNSRTPGAASPKDMLILVDVSGSVSGLTLKLIRTSVSEMLETLSDDDFVNVASFNSNAQDVSCFQHLVQANVRNKKVLKDAVNNITAKGITDYKKGFSFAFEQLLNYNVSRANCNKIIMLFTDGGEERAQEIFNKYNKDKKVRVFRFSVGQHNYERGPIQWMACENNKIDLYDVRRRPWYIQKGYYYEIPSIGAIRINTQEYLDVLGRPMVLAGDKAKQVQWTNVYLDALELGLVITGTLPVFNITGQFENKTNLKNQLILGVMGVDVSLEDIKRLTPRFTLCPNGYYFAIDPNGYVLLHPNLQPKNPKSQEPVTLDFLDAELENDIKVEIRNKMIDGESGEKTFRTLVKSQDERYIDKGNRTYTWTPVNGTDYSLALVLPTYSFYYIKAKLEETITQARSKKGKMKDSETLKPDNFEESGYTFIAPRDYCNDLKISDNNTEFLLNFNEFIDRKTPNNPSCNADLINRVLLDAGFTNELVQNYWSKQKNIKGVKARFVVTDGGITRVYPKEAGENWQENPETYEDSFYKRSLDNDNYVFTAPYFNKSGPGAYESGIMVSKAVEIYIQGKLLKPAVVGIKIDVNSWIENFTKTSIRDPCAGPVCDCKRNSDVMDCVILDDGGFLLMANHDDYTNQIGRFFGEIDPSLMRHLVNISVYAFNKSYDYQSVCEPGAAPKQGAGHRSAYVPSVADILQIGWWATAAAWSILQQFLLSLTFPRLLEAVEMEDDDFTASLSKQSCITEQTQYFFDNDSKSFSGVLDCGNCSRIFHGEKLMNTNLIFIMVESKGTCPCDTRLLIQAEQTSDGPNPCDMVKQPRYRKGPDVCFDNNVLEDYTDCGGVSGLNPSLWYIIGIQFLLLWLVSGSTHRLL

SEQ ID NO: 21 - DNA, 323 bp, Human
ccccctgccagtggccaaacagaagcagaagtcgggtaatgaaatgactaacttagcctttgaactagaccccctagagttagaggaggaagaggctgagcttggtgagcagagtggctctgccaagactagtgttagcagtgtcaccaccccgccaccccatggcaaacgcatccccttctttaagaagacagagcatgtgcccccctatgacgtggtgccttccatgaggcccatcatcctggtgggaccgtcgctcaagggctacgaggttacagacatgatgcagaaagctttatttgacttcttgaagcatcggtttg

SEQ ID NO: 22 - DNA, 57 bp, Human
cctattggtgtaggtataccaacaattaatttaagaaaaaggagacccaatatccag

SEQ ID NO: 23 - DNA, 180 bp, Human
tggtcctttgcctgcgcctgtgccgccttcatcctcctctttctcggcggtctcgccctcctgctgttctccctgcctcgaatgccccggaacccatgggagtcctgcatggatgctgagcccgagcactaaccctcctgcggccctagcgaccctcaggcttcttcccaggaagcgggg

SEQ ID NO: 24 - protein, 43 aa, Human
WSFACACAAFILLFLGGLALLLFSLPRMPRNPWESCMDAEPEH

SEQ ID NO: 25 - DNA, 22 bp, Human
aattcggtacgtacactcgagc

SEQ ID NO: 26 - DNA, 18 bp, Human
gctcgagtgtacgtaccg

SEQ ID NO: 27 - DNA, 20 bp, Human
ccatggtaccttcgttgacg

SEQ ID NO: 28 - DNA, 24 bp, Human
aattcgtcaacgaaggtaccatgg

SEQ ID NO: 29 - DNA, 2153 bp, Human
  CDS (53)...(1504): standard name = Beta-3-1
ccgcctcggaccccctgtcccgggggagggggagagcccgctaccctggtctatgtctttttctgactccagtgcaaccttcctgctgaacgagggttcagccgactcctacaccagccgcccatctctggactcagacgtctccctggaggaggaccgggagagtgcccggcgtgaagtagagagccaggctcagcagcagctcgaaagggccaagcacaaacctgtggcatttgcggtgaggaccaatgtcagctactgtggcgtactggatgaggagtgcccagtccagggctctggagtcaactttgaggccaaagattttctgcacattaaagagaagtacagcaatgactggtggatcgggcggctagtgaaagagggcggggacatcgccttcatccccagcccccagcgcctggagagcatccggctcaaacaggagcagaaggccaggagatctgggaacccttccagcctgagtgacattggcaaccgacgctcccctccgccatctctagccaagcagaagcaaaagcaggcggaacatgttcccccgtatgacgtggtgccctccatgcggcctgtggtgctggtgggaccctctctgaaaggttatgaggtcacagacatgatgcagaaggctctcttcgacttcctcaaacacagatttgatggcaggatctccatcacccgagtcacagccgacctctccctggcaaagcgatctgtgctcaacaatccgggcaagaggaccatcattgagcgctcctctgcccgctccagcattgcggaagtgcagagtgagatcgagcgcatatttgagctggccaaatccctgcagctagtagtgttggacgctgacaccatcaaccacccagcacagctggccaagacctcgctggcccccatcatcgtctttgtcaaagtgtcctcaccaaaggtactccagcgtctcattcgctcccgggggaagtcacagatgaagcacctgaccgtacagatgatggcatatgataagctggttcagtgcccaccggagtcatttgatgtgattctggatgagaaccagctggaggatgcctgtgagcacctggctgagtacctggaggtttactggcgggccacgcaccacccagcccctggccccggacttctgggtcctcccagtgccatccccggacttcagaaccagcagctgctgggggagcgtggcgaggagcactccccccttgagcgggacagcttgatgccctctgatgaggccagcgagagctcccgccaagcctggacaggatcttcacagcgtagctcccgccacctggaggaggactatgcagatgcctaccaggacctgtaccagcctcaccgccaacacacctcggggctgcctagtgctaacgggcatgacccccaagaccggcttctagcccaggactcagaacacaaccacagtgaccggaactggcagcgcaaccggccttggcccaaggatagctactgacagcctcctgctgccctaccctggcaggcacaggcgcagctggctggggggcccactccaggcagggtggcgttagactggcatcaggctggcactaggctcagcccccaaaaccccctgcccagccccagcttcagggctgcctgtggtcccaaggttctgggagaaacaggggaccccctcacctcctgggcagtgacccctactaggctcccattccaggtactagctgtgtgttctgcacccctggcaccttcctctcctcccacacaggaagctgccccactgggcagtgccctcaggccaggatccccttagcagggtccttcccaccagactcagggaagggatgccccattaaagtgacaaaagggtgggtgtgggcaccatggcatgaggaagaaacaaggtccctgagcaggcacaagtcctgacagtcaagggactgctttggcatccagggcctccagtcacctcactgccatacattagaaatgagacaattcaaagcccccccagggtggcacacccatctgttgctggggtgtggcagccacatccaagactggagcagcaggctggccacgcttgggccagagagagctcacagctgaagctcttggagggaagggctctcctcacccaatcg

SEQ ID NO: 30 - protein, 483 aa, Human
MSFSDSSATFLLNEGSADSYTSRPSLDSDVSLEEDRESARREVESQAQQQLERAKHKPVAFAVRTNVSYCGVLDEECPVQGSGVNFEAKDFLHIKEKYSNDWWIGRLVKEGGDIAFIPSPQRLESIRLKQEQKARRSGNPSSLSDIGNRRSPPPSLAKQKQKQAEHVPPYDVVPSMRPVVLVGPSLKGYEVTDMMQKALFDFLKHRFDGRISITRVTADLSLAKRSVLNNPGKRTIIERSSARSSIAEVQSEIERIFELAKSLQLVVLDADTINHPAQLAKTSLAPIIVFVKVSSPKVLQRLIRSRGKSQMKHLTVQMMAYDKLVQCPPESFDVILDENQLEDACEHLAEYLEVYWRATHHPAPGPGLLGPPSAIPGLQNQQLLGERGEEHSPLERDSLMPSDEASESSRQAWTGSSQRSSRHLEEDYADAYQDLYQPHRQHTSGLPSANGHDPQDRLLAQDSEHNHSDRNWQRNRPWPKDSY

SEQ ID NO: 31 - DNA, 2144 bp, Human
  CDS (51)...(1492): A Beta3 subunit of human calcium channel
cgcccccggcgccgctcgttcccccgacccggactcccccatgtatgacgactcctacgtgcccgggtttgaggactcggaggcggtttcagccgactcctacaccagccgcccatctctggactcagacgtctccctggaggaggaccgggagagtgcccggcgtgaagtagagagccaggctcagcagcagctcgaaagggccaagcacaaacctgtggcatttgcggtgaggaccaatgtcagctactgtggcgtactggatgaggagtgcccagtccagggctctggagtcaactttgaggccaaagattttctgcacattaaagagaagtacagcaatgactggtggatcgggcggctagtgaaagagggcggggacatcgccttcatccccagcccccagcgcctggagagcatccggctcaaacaggagcagaaggccaggagatctgggaacccttccagcctgagtgacattggcaaccgacgctcccctccgccatctctagctaagcagaagcaaaagcaggcggaacatgttcccccgtatgacgtggtgccctccatgcggcctgtggtgctggtgggaccctctctgaaaggttatgaggtcacagacatgatgcagaaggctctcttcgacttcctcaaacacagatttgatggcaggatctccatcacccgagtcacagccgacctctccctggcaaagcgatctgtgctcaacaatccgggcaagaggaccatcattgagcgctcctctgcccgctccagcattgcggaagtgcagagtgagatcgagcgcatatttgagctggccaaatccctgcagctagtagtgttggacgctgacaccatcaaccacccagcacagctggccaagacctcgctggcccccatcatcgtctttgtcaaagtgtcctcaccaaaggtactccagcgtctcattcgctcccgggggaagtcacagatgaagcacctgaccgtacagatgatggcatatgataagctggttcagtgcccaccggagtcatttgatgtgattctggatgagaaccagctggaggatgcctgtgagcacctggctgagtacctggaggtttactggcgggccacgcaccacccagcccctggccccggacttctgggtcctcccagtgccatccccggacttcagaaccagcagctgctgggggagcgtggcgaggagcactccccccttgagcgggacagcttgatgccctctgatgaggccagcgagagctcccgccaagcctggacaggatcttcacagcgtagctcccgccacctggaggaggactatgcagatgcctaccaggacctgtaccagcctcaccgccaacacacctcggggctgcctagtgctaacgggcatgacccccaagaccggcttctagcccaggactcagaacacaaccacagtgaccggaactggcagcgcaaccggccttggcccaaggatagctactgacagcctcctgctgccctaccctggcaggcacaggcgcagctggctggggggcccactccaggcagggtggcgttagactggcatcaggctggcactaggctcagcccccaaaaccccctgcccagccccagcttcagggctgcctgtggtcccaaggttctgggagaaacaggggaccccctcacctcctgggcagtgacccctactaggctcccattccaggtactagctgtgtgttctgcacccctggcaccttcctctcctcccacacaggaagctgccccactgggcagtgccctcaggccaggatccccttagcagggtccttcccaccagactcagggaagggatgccccattaaagtgacaaaagggtgggtgtgggcaccatggcatgaggaagaaacaaggtccctgagcaggcacaagtcctgacagtcaagggactgctttggcatccagggcctccagtcacctcactgccatacattagaaatgagacaattcaaagcccccccagggtggcacacccatctgttgctggggtgtggcagccacatccaagactggagcagcaggctggccacgcttgggccagagagagctcacagctgaagctcttggagggaagggctctcctcacccaatcg

SEQ ID NO: 32 - DNA, 28 bp, Human
ctcagtaccatctctgataccagcccca

SEQ ID NO: 33 - DNA, 7808 bp, Human
  CDS (237)...(7769): standard name = Alpha-1A-1
gatgtcccgagctgctatccccggctcggcccgggcagccgccttctgagcccccgacccgaggcgccgagccgccgccgcccgatgggctgggccgtggagcgtctccgcagtcgtagctccagccgccgcgctcccagccccggcagcctcagcatcagcggcggcggcggcggcggcggcgtcttccgcatcgttcgccgcagcgtaacccggagccctttgctctttgcagaatggcccgcttcggagacgagatgccggcccgctacgggggaggaggctccggggcagccgccggggtggtcgtgggcagcggaggcgggcgaggagccgggggcagccggcagggcgggcagcccggggcgcaaaggatgtacaagcagtcaatggcgcagagagcgcggaccatggcactctacaaccccatccccgtccgacagaactgcctcacggttaaccggtctctcttcctcttcagcgaagacaacgtggtgagaaaatacgccaaaaagatcaccgaatggcctccctttgaatatatgattttagccaccatcatagcgaattgcatcgtcctcgcactggagcagcatctgcctgatgatgacaagaccccgatgtctgaacggctggatgacacagaaccatacttcattggaattttttgtttcgaggctggaattaaaatcattgcccttgggtttgccttccacaaaggctcctacttgaggaatggctggaatgtcatggactttgtggtggtgctaacgggcatcttggcgacagttgggacggagtttgacctacggacgctgagggcagttcgagtgctgcggccgctcaggctggtctctggaatcccaagtttacaagtcgtcctgaagtcgatcatgaaggcgatgatccctttgctgcagatcggcctcctcctattttttgcaatccttatttttgcaatcatagggttagaattttatatgggaaaatttcataccacctgctttgaagaggggacagatgacattcagggtgagtctccggctccatgtgggacagaagagcccgcccgcacctgccccaatgggaccaaatgtcagccctactgggaagggcccaacaacgggatcactcagttcgacaacatcctgtttgcagtgctgactgttttccagtgcataaccatggaagggtggactgatctcctctacaatagcaacgatgcctcagggaacacttggaactggttgtacttcatccccctcatcatcatcggctccttttttatgctgaaccttgtgctgggtgtgctgtcaggggagtttgccaaagaaagggaacgggtggagaaccggcgggcttttctgaagctgaggcggcaacaacagattgaacgtgagctcaatgggtacatggaatggatctcaaaagcagaagaggtgatcctcgccgaggatgaaactgacggggagcagaggcatccctttgatggagctctgcggagaaccaccataaagaaaagcaagacagatttgctcaaccccgaagaggctgaggatcagctggctgatatagcctctgtgggttctcccttcgcccgagccagcattaaaagtgccaagctggagaactcgaccttttttcacaaaaaggagaggaggatgcgtttctacatccgccgcatggtcaaaactcaggccttctactggactgtactcagtttggtagctctcaacacgctgtgtgttgctattgttcactacaaccagcccgagtggctctccgacttcctttactatgcagaattcattttcttaggactctttatgtccgaaatgtttataaaaatgtacgggcttgggacgcggccttacttccactcttccttcaactgctttgactgtggggttatcattgggagcatcttcgaggtcatctgggctgtcataaaacctggcacatcctttggaatcagcgtgttacgagccctcaggttattgcgtattttcaaagtcacaaagtactgggcatctctcagaaacctggtcgtctctctcctcaactccatgaagtccatcatcagcctgttgtttctccttttcctgttcattgtcgtcttcgcccttttgggaatgcaactcttcggcggccagtttaatttcgatgaagggactcctcccaccaacttcgatacttttccagcagcaataatgacggtgtttcagatcctgacgggcgaagactggaacgaggtcatgtacgacgggatcaagtctcaggggggcgtgcagggcggcatggtgttctccatctatttcattgtactgacgctctttgggaactacaccctcctgaatgtgttcttggccatcgctgtggacaatctggccaacgcccaggagctcaccaaggtggaggcggacgagcaagaggaagaagaagcagcgaaccagaaacttgccctacagaaagccaaggaggtggcagaagtgagtcctctgtccgcggccaacatgtctatagctgtgaaagagcaacagaagaatcaaaagccagccaagtccgtgtgggagcagcggaccagtgagatgcgaaagcagaacttgctggccagccgggaggccctgtataacgaaatggacccggacgagcgctggaaggctgcctacacgcggcacctgcggccagacatgaagacgcacttggaccggccgctggtggtggacccgcaggagaaccgcaacaacaacaccaacaagagccgggcggccgagcccaccgtggaccagcgcctcggccagcagcgcgccgaggacttcctcaggaaacaggcccgctaccacgatcgggcccgggaccccagcggctcggcgggcctggacgcacggaggccctgggcgggaagccaggaggccgagctgagccgggagggaccctacggccgcgagtcggaccaccacgcccgggagggcagcctggagcaacccgggttctgggagggcgaggccgagcgaggcaaggccggggacccccaccggaggcacgtgcaccggcaggggggcagcagggagagccgcagcgggtccccgcgcacgggcgcggacggggagcatcgacgtcatcgcgcgcaccgcaggcccggggaggagggtccggaggacaaggcggagcggagggcgcggcaccgcgagggcagccggccggcccggggcggcgagggcgagggcgagggccccgacgggggcgagcgcaggagaaggcaccggcatggcgctccagccacgtacgagggggacgcgcggagggaggacaaggagcggaggcatcggaggaggaaagagaaccagggctccggggtccctgtgtcgggccccaacctgtcaaccacccggccaatccagcaggacctgggccgccaagacccacccctggcagaggatattgacaacatgaagaacaacaagctggccaccgcggagtcggccgctccccacggcagccttggccacgccggcctgccccagagcccagccaagatgggaaacagcaccgaccccggccccatgctggccatccctgccatggccaccaacccccagaacgccgccagccgccggacgcccaacaacccggggaacccatccaatcccggcccccccaagacccccgagaatagccttatcgtcaccaaccccagcggcacccagaccaattcagctaagactgccaggaaacccgaccacaccacagtggacatccccccagcctgcccaccccccctcaaccacaccgtcgtacaagtgaacaaaaacgccaacccagacccactgccaaaaaaagaggaagagaagaaggaggaggaggaagacgaccgtggggaagacggccctaagccaatgcctccctatagctccatgttcatcctgtccacgaccaacccccttcgccgcctgtgccattacatcctgaacctgcgctactttgagatgtgcatcctcatggtcattgccatgagcagcatcgccctggccgccgaggaccctgtgcagcccaacgcacctcggaacaacgtgctgcgatactttcactacgtttttacaggcgtcttcacctttgagatggtgatcaagatgattgacctggggctcgtcctgcatcagggtgcctacttccgtgacctctggaatattctcgacttcatagtggtcagtggggccctggtagcctttgccttcactggcaatagcaaaggaaaagacatcaacacgattaaatccctccgagtcctccgggtgctacgacctcttaaaaccatcaagcggctgccaaagctcaaggctgtgtttgactgtgtggtgaactcacttaaaaacgtcttcaacatcctcatcgtctacatgctattcatgttcatcttcgccgtggtggctgtgcagctcttcaaggggaaattcttccactgcactgacgagtccaaagagtttgagaaagattgtcgaggcaaatacctcctctacgagaagaatgaggtgaaggcgcgagaccgggagtggaagaagtatgaattccattacgacaatgtgctgtgggctctgctgaccctcttcaccgtgtccacgggagaaggctggccacaggtcctcaagcattcggtggacgccacctttgagaaccagggccccagccccgggtaccgcatggagatgtccattttctacgtcgtctactttgtggtgttccccttcttctttgtcaatatctttgtggccttgatcatcatcaccttccaggagcaaggggacaagatgatggaggaatacagcctggagaaaaatgagagggcctgcattgatttcgccatcagcgccaagccgctgacccgacacatgccgcagaacaagcagagcttccagtaccgcatgtggcagttcgtggtgtctccgcctttcgagtacacgatcatggccatgatcgccctcaacaccatcgtgcttatgatgaagttctatggggcttctgttgcttatgaaaatgccctgcgggtgttcaacatcgtcttcacctccctcttctctctggaatgtgtgctgaaagtcatggcttttgggattctgaattatttccgcgatgcctggaacatcttcgactttgtgactgttctgggcagcatcaccgatatcctcgtgactgagtttgggaatccgaataacttcatcaacctgagctttctccgcctcttccgagctgcccggctcatcaaacttctccgtcagggttacaccatccgcattcttctctggacctttgtgcagtccttcaaggccctgccttatgtctgtctgctgatcgccatgctcttcttcatctatgccatcattgggatgcaggtgtttggtaacattggcatcgacgtggaggacgaggacagtgatgaagatgagttccaaatcactgagcacaataacttccggaccttcttccaggccctcatgcttctcttccggagtgccaccggggaagcttggcacaacatcatgctttcctgcctcagcgggaaaccgtgtgataagaactctggcatcctgactcgagagtgtggcaatgaatttgcttatttttactttgtttccttcatcttcctctgctcgtttctgatgctgaatctctttgtcgccgtcatcatggacaactttgagtacctcacccgagactcctccatcctgggcccccaccacctggatgagtacgtgcgtgtctgggccgagtatgaccccgcagcttggggccgcatgccttacctggacatgtatcagatgctgagacacatgtctccgcccctgggtctggggaagaagtgtccggccagagtggcttacaagcggcttctgcggatggacctgcccgtcgcagatgacaacaccgtccacttcaattccaccctcatggctctgatccgcacagccctggacatcaagattgccaagggaggagccgacaaacagcagatggacgctgagctgcggaaggagatgatggcgatttggcccaatctgtcccagaagacgctagacctgctggtcacacctcacaagtccacggacctcaccgtggggaagatctacgcagccatgatgatcatggagtactaccggcagagcaaggccaagaagctgcaggccatgcgcgaggagcaggaccggacacccctcatgttccagcgcatggagcccccgtccccaacgcaggaagggggacctggccagaacgccctcccctccacccagctggacccaggaggagccctgatggctcacgaaagcggcctcaaggagagcccgtcctgggtgacccagcgtgcccaggagatgttccagaagacgggcacatggagtccggaacaaggcccccctaccgacatgcccaacagccagcctaactctcagtccgtggagatgcgagagatgggcagagatggctactccgacagcgagcactacctccccatggaaggccagggccgggctgcctccatgccccgcctccctgcagagaaccagaggagaaggggccggccacgtgggaataacctcagtaccatctcagacaccagccccatgaagcgttcagcctccgtgctgggccccaaggcccgacgcctggacgattactcgctggagcgggtcccgcccgaggagaaccagcggcaccaccagcggcgccgcgaccgcagccaccgcgcctctgagcgctccctgggccgctacaccgatgtggacacaggcttggggacagacctgagcatgaccacccaatccggggacctgccgtcgaaggagcgggaccaggagcggggccggcccaaggatcggaagcatcgacagcaccaccaccaccaccaccaccaccaccatcccccgccccccgacaaggaccgctatgcccaggaacggccggaccacggccgggcacgggctcgggaccagcgctggtcccgctcgcccagcgagggccgagagcacatggcgcaccggcagggcagtagttccgtaagtggaagcccagccccctcaacatctggtaccagcactccgcggcggggccgccgccagctcccccagaccccctccaccccccggccacacgtgtcctattcccctgtgatccgtaaggccggcggctcggggcccccgcagcagcagcagcagcagcagcagcagcagcaggcggtggccaggccgggccgggcggccaccagcggccctcggaggtacccaggccccacggccgagcctctggccggagatcggccgcccacggggggccacagcagcggccgctcgcccaggatggagaggcgggtcccaggcccggcccggagcgagtcccccagggcctgtcgacacggcggggcccggtggccggcatctggcccgcacgtgtccgaggggcccccgggtccccggcaccatggctactaccggggctccgactacgacgaggccgatggcccgggcagcgggggcggcgaggaggccatggccggggcctacgacgcgccaccccccgtacgacacgcgtcctcgggcgccaccgggcgctcgcccaggactccccgggcctcgggcccggcctgcgcctcgccttctcggcacggccggcgactccccaacggctactacccggcgcacggactggccaggccccgcgggccgggctccaggaagggcctgcacgaaccctacagcgagagtgacgatgattggtgctaagcccgggcgaggtggcgcccgcccggccccccacgcacc

SEQ ID NO: 34 - protein, 2510 aa, Human
MARFGDEMPARYGGGGSGAAAGVVVGSGGGRGAGGSRQGGQPGAQRMYKQSMAQRARTMALYNPIPVRQNCLTVNRSLFLFSEDNVVRKYAKKITEWPPFEYMILATIIANCIVLALEQHLPDDDKTPMSERLDDTEPYFIGIFCFEAGIKIIALGFAFHKGSYLRNGWNVMDFVVVLTGILATVGTEFDLRTLRAVRVLRPLKLVSGIPSLQVVLKSIMKAMIPLLQIGLLLFFAILIFAIIGLEFYMGKFHTTCFEEGTDDIQGESPAPCGTEEPARTCPNGTKCQPYWEGPNNGITQFDNILFAVLTVFQCITMEGWTDLLYNSNDASGNTWNWLYFIPLIIIGSFFMLNLVLGVLSGEFAKERERVENRRAFLKLRRQQQIERELNGYMEWISKAEEVILAEDETDGEQRHPFDGALRRTTIKKSKTDLLNPEEAEDQLADIASVGSPFARASIKSAKLENSTFFHKKERRMRFYIRRMVKTQAFYWTVLSLVALNTLCVAIVHYNQPEWLSDFLYYAEFIFLGLFMSEMFIKMYGLGTRPYFHSSFNCFDCGVIIGSIFEVIWAVIKPGTSFGISVLRALRLLRIFKVTKYWASLRNLVVSLLNSMKSIISLLFLLFLFIVVFALLGMQLFGGQFNFDEGTPPTNFDTFPAAIMTVFQILTGEDWNEVMYDGIKSQGGVQGGMVFSIYFIVLTLFGNYTLLNVFLAIAVDNLANAQELTKVEADEQEEEEAANQKLALQKAKEVAEVSPLSAANMSIAVKEQQKNQKPAKSVWEQRTSEMRKQNLLASREALYNEMDPDERWKAAYTRHLRPDMKTHLDRPLVVDPQENRNNNTNKSRAAEPTVDQRLGQQRAEDFLRKQARYHDRARDPSGSAGLDARRPWAGSQEAELSREGPYGRESDHHAREGSLEQPGFWEGEAERGKAGDPHRRHVHRQGGSRESRSGSPRTGADGEHRRHRAHRRPGEEGPEDKAERRARHREGSRPARGGEGEGEGPDGGERRRRHRHGAPATYEGDARREDKERRHRRRKENQGSGVPVSGPNLSTTRPIQQDLGRQDPPLAEDIDNMKNNKLATAESAAPHGSLGHAGLPQSPAKMGNSTDPGPMLAIPAMATNPQNAASRRTPNNPGNPSNPGPPKTPENSLIVTNPSGTQTNSAKTARKPDHTTVDIPPACPPPLNHTVVQVNKNANPDPLPKKEEEKKEEEEDDRGEDGPKPMPPYSSMFILSTTNPLRRLCHYILNLRYFEMCILMVIAMSSIALAAEDPVQPNAPRNNVLRYFDYVFTGVFTFEMVIKMIDLGLVLHQGAYFRDLWNILDFIVVSGALVAFAFTGNSKGKDINTIKSLRVLRVLRPLKTIKRLPKLKAVFDCVVNSLKNVFNILIVYMLFMFIFAVVAVQLFKGKFFHCTDESKEFEKDCRGKYLLYEKNEVKARDREWKKYEFHYDNVLWALLTLFTVSTGEGWPQVLKHSVDATFENQGPSPGYRMEMSIFYVVYFVVFPFFFVNIFVALIIITFQEQGDKMMEEYSLEKNERACIDFAISAKPLTRHMPQNKQSFQYRMWQFVVSPPFEYTIMAMIALNTIVLMMKFYGASVAYENALRVFNIVFTSLFSLECVLKVMAFGILNYFRDAWNIFDFVTVLGSITDILVTEFGNPNNFINLSFLRLFRAARLIKLLRQGYTIRILLWTFVQSFKALPYVCLLIAMLFFIYAIIGMQVFGNIGIDVEDEDSDEDEFQITEHNNFRTFFQALMLLFRSATGEAWHNIMLSCLSGKPCDKNSGILTRECGNEFAYFYFVSFIFLCSFLMLNLFVAVIMDNFEYLTRDSSILGPHHLDEYVRVWAEYDPAAWGRMPYLDMYQMLRHMSPPLGLGKKCPARVAYKRLLRMDLPVADDNTVHFNSTLMALIRTALDIKIAKGGADKQQMDAELRKEMMAIWPNLSQKTLDLLVTPHKSTDLTVGKIYAAMMIMEYYRQSKAKKLQAMREEQDRTPLMFQRMEPPSPTQEGGPGQNALPSTQLDPGGALMAHESGLKESPSWVTQRAQEMFQKTGTWSPEQGPPTDMPNSQPNSQSVEMREMGRDGYSDSEHYLPMEGQGRAASMPRLPAENQRRRGRPRGNNLSTISDTSPMKRSASVLGPKARRLDDYSLERVPPEENQRHHQRRRDRSHRASERSLGRYTDVDTGLGTDLSMTTQSGDLPSKERDQERGRPKDRKHRQHHHHHHHHHHPPPPDKDRYAQERPDHGRARARDQRWSRSPSEGREHMAHRQGSSSVSGSPAPSTSGTSTPRRGRRQLPQTPSTPRPHVSYSPVIRKAGGSGPPQQQQQQQQQQQAVARPGRAATSGPRRYPGPTAEPLAGDRPPTGGHSSGRSPRMERRVPGPARSESPRACRHGGARWPASGPHVSEGPPGPRHHGYYRGSDYDEADGPGSGGGEEAMAGAYDAPPPVRHASSGATGRSPRTPRASGPACASPSRHGRRLPNGYYPAHGLARPRGPGSRKGLHEPYSESDDDWC

SEQ ID NO: 35 - DNA, 7791 bp, Human
  CDS (237)...(7037): standard name = Alpha-1A-2
gatgtcccgagctgctatccccggctcggcccgggcagccgccttctgagcccccgacccgaggcgccgagccgccgccgcccgatgggctgggccgtggagcgtctccgcagtcgtagctccagccgccgcgctcccagccccggcagcctcagcatcagcggcggcggcggcggcggcggcgtcttccgcatcgttcgccgcagcgtaacccggagccctttgctctttgcagaatggcccgcttcggagacgagatgccggcccgctacgggggaggaggctccggggcagccgccggggtggtcgtgggcagcggaggcgggcgaggagccgggggcagccggcagggcgggcagcccggggcgcaaaggatgtacaagcagtcaatggcgcagagagcgcggaccatggcactctacaaccccatccccgtccgacagaactgcctcacggttaaccggtctctcttcctcttcagcgaagacaacgtggtgagaaaatacgccaaaaagatcaccgaatggcctccctttgaatatatgattttagccaccatcatagcgaattgcatcgtcctcgcactggagcagcatctgcctgatgatgacaagaccccgatgtctgaacggctggatgacacagaaccatacttcattggaattttttgtttcgaggctggaattaaaatcattgcccttgggtttgccttccacaaaggctcctacttgaggaatggctggaatgtcatggactttgtggtggtgctaacgggcatcttggcgacagttgggacggagtttgacctacggacgctgagggcagttcgagtgctgcggccgctcaagctggtgtctggaatcccaagtttacaagtcgtcctgaagtcgatcatgaaggcgatgatccctttgctgcagatcggcctcctcctattttttgcaatccttatttttgcaatcatagggttagaattttatatgggaaaatttcataccacctgctttgaagaggggacagatgacattcagggtgagtctccggctccatgtgggacagaagagcccgcccgcacctgccccaatgggaccaaatgtcagccctactgggaagggcccaacaacgggatcactcagttcgacaacatcctgtttgcagtgctgactgttttccagtgcataaccatggaagggtggactgatctcctctacaatagcaacgatgcctcagggaacacttggaactggttgtacttcatccccctcatcatcatcggctccttttttatgctgaaccttgtgctgggtgtgctgtcaggggagtttgccaaagaaagggaacgggtggagaaccggcgggcttttctgaagctgaggcggcaacaacagattgaacgtgagctcaatgggtacatggaatggatctcaaaagcagaagaggtgatcctcgccgaggatgaaactgacggggagcagaggcatccctttgatggagctctgcggagaaccaccataaagaaaagcaagacagatttgctcaaccccgaagaggctgaggatcagctggctgatatagcctctgtgggttctcccttcgcccgagccagcattaaaagtgccaagctggagaactcgaccttttttcacaaaaaggagaggaggatgcgtttctacatccgccgcatggtcaaaactcaggccttctactggactgtactcagtttggtagctctcaacacgctgtgtgttgctattgttcactacaaccagcccgagtggctctccgacttcctttactatgcagaattcattttcttaggactctttatgtccgaaatgtttataaaaatgtacgggcttgggacgcggccttacttccactcttccttcaactgctttgactgtggggttatcattgggagcatcttcgaggtcatctgggctgtcataaaacctggcacatcctttggaatcagcgtgttacgagccctcaggttattgcgtattttcaaagtcacaaagtactgggcatctctcagaaacctggtcgtctctctcctcaactccatgaagtccatcatcagcctgttgtttctccttttcctgttcattgtcgtcttcgcccttttgggaatgcaactcttcggcggccagtttaatttcgatgaagggactcctcccaccaacttcgatacttttccagcagcaataatgacggtgtttcagatcctgacgggcgaagactggaacgaggtcatgtacgacgggatcaagtctcaggggggcgtgcagggcggcatggtgttctccatctatttcattgtactgacgctctttgggaactacaccctcctgaatgtgttcttggccatcgctgtggacaatctggccaacgcccaggagctcaccaaggtggaggcggacgagcaagaggaagaagaagcagcgaaccagaaacttgccctacagaaagccaaggaggtggcagaagtgagtcctctgtccgcggccaacatgtctatagctgtgaaagagcaacagaagaatcaaaagccagccaagtccgtgtgggagcagcggaccagtgagatgcgaaagcagaacttgctggccagccgggaggccctgtataacgaaatggacccggacgagcgctggaaggctgcctacacgcggcacctgcggccagacatgaagacgcacttggaccggccgctggtggtggacccgcaggagaaccgcaacaacaacaccaacaagagccgggcggccgagcccaccgtggaccagcgcctcggccagcagcgcgccgaggacttcctcaggaaacaggcccgctaccacgatcgggcccgggaccccagcggctcggcgggcctggacgcacggaggccctgggcgggaagccaggaggccgagctgagccgggagggaccctacggccgcgagtcggaccaccacgcccgggagggcagcctggagcaacccgggttctgggagggcgaggccgagcgaggcaaggccggggacccccaccggaggcacgtgcaccggcaggggggcagcagggagagccgcagcgggtccccgcgcacgggcgcggacggggagcatcgacgtcatcgcgcgcaccgcaggcccggggaggagggtccggaggacaaggcggagcggagggcgcggcaccgcgagggcagccggccggcccggggcggcgagggcgagggcgagggccccgacgggggcgagcgcaggagaaggcaccggcatggcgctccagccacgtacgagggggacgcgcggagggaggacaaggagcggaggcatcggaggaggaaagagaaccagggctccggggtccctgtgtcgggccccaacctgtcaaccacccggccaatccagcaggacctgggccgccaagacccacccctggcagaggatattgacaacatgaagaacaacaagctggccaccgcggagtcggccgctccccacggcagccttggccacgccggcctgccccagagcccagccaagatgggaaacagcaccgaccccggccccatgctggccatccctgccatggccaccaacccccagaacgccgccagccgccggacgcccaacaacccggggaacccatccaatcccggcccccccaagacccccgagaatagccttatcgtcaccaaccccagcggcacccagaccaattcagctaagactgccaggaaacccgaccacaccacagtggacatccccccagcctgcccaccccccctcaaccacaccgtcgtacaagtgaacaaaaacgccaacccagacccactgccaaaaaaagaggaagagaagaaggaggaggaggaagacgaccgtggggaagacggccctaagccaatgcctccctatagctccatgttcatcctgtccacgaccaacccccttcgccgcctgtgccattacatcctgaacctgcgctactttgagatgtgcatcctcatggtcattgccatgagcagcatcgccctggccgccgaggaccctgtgcagcccaacgcacctcggaacaacgtgctgcgatactttgactacgtttttacaggcgtcttcacctttgagatggtgatcaagatgattgacctggggctcgtcctgcatcagggtgcctacttccgtgacctctggaatattctcgacttcatagtggtcagtggggccctggtagcctttgccttcactggcaatagcaaaggaaaagacatcaacacgattaaatccctccgagtcctccgggtgctacgacctcttaaaaccatcaagcggctgccaaagctcaaggctgtgtttgactgtgtggtgaactcacttaaaaacgtcttcaacatcctcatcgtctacatgctattcatgttcatcttcgccgtggtggctgtgcagctcttcaaggggaaattcttccactgcactgacgagtccaaagagtttgagaaagattgtcgaggcaaatacctcctctacgagaagaatgaggtgaaggcgcgagaccgggagtggaagaagtatgaattccattacgacaatgtgctgtgggctctgctgaccctcttcaccgtgtccacgggagaaggctggccacaggtcctcaagcattcggtggacgccacctttgagaaccagggccccagccccgggtaccgcatggagatgtccattttctacgtcgtctactttgtggtgttccccttcttctttgtcaatatctttgtggccttgatcatcatcaccttccaggagcaaggggacaagatgatggaggaatacagcctggagaaaaatgagagggcctgcattgatttcgccatcagcgccaagccgctgacccgacacatgccgcagaacaagcagagcttccagtaccgcatgtggcagttcgtggtgtctccgcctttcgagtacacgatcatggccatgatcgccctcaacaccatcgtgcttatgatgaagttctatggggcttctgttgcttatgaaaatgccctgcgggtgttcaacatcgtcttcacctccctcttctctctggaatgtgtgctgaaagtcatggcttttgggattctgaattatttccgcgatgcctggaacatcttcgactttgtgactgttctgggcagcatcaccgatatcctcgtgactgagtttgggaatccgaataacttcatcaacctgagctttctccgcctcttccgagctgcccggctcatcaaacttctccgtcagggttacaccatccgcattcttctctggacctttgtgcagtccttcaaggccctgccttatgtctgtctgctgatcgccatgctcttcttcatctatgccatcattgggatgcaggtgtttggtaacattggcatcgacgtggaggacgaggacagtgatgaagatgagttccaaatcactgagcacaataacttccggaccttcttccaggccctcatgcttctcttccggagtgccaccggggaagcttggcacaacatcatgctttcctgcctcagcgggaaaccgtgtgataagaactctggcatcctgactcgagagtgtggcaatgaatttgcttatttttactttgtttccttcatcttcctctgctcgtttctgatgctgaatctctttgtcgccgtcatcatggacaactttgagtacctcacccgagactcctccatcctgggcccccaccacctggatgagtacgtgcgtgtctgggccgagtatgaccccgcagcttggggccgcatgccttacctggacatgtatcagatgctgagacacatgtctccgcccctgggtctggggaagaagtgtccggccagagtggcttacaagcggcttctgcggatggacctgcccgtcgcagatgacaacaccgtccacttcaattccaccctcatggctctgatccgcacagccctggacatcaagattgccaagggaggagccgacaaacagcagatggacgctgagctgcggaaggagatgatggcgatttggcccaatctgtcccagaagacgctagacctgctggtcacacctcacaagtccacggacctcaccgtggggaagatctacgcagccatgatgatcatggagtactaccggcagagcaaggccaagaagctgcaggccatgcgcgaggagcaggaccggacacccctcatgttccagcgcatggagcccccgtccccaacgcaggaagggggacctggccagaacgccctcccctccacccagctggacccaggaggagccctgatggctcacgaaagcggcctcaaggagagcccgtcctgggtgacccagcgtgcccaggagatgttccagaagacgggcacatggagtccggaacaaggcccccctaccgacatgcccaacagccagcctaactctcagtccgtggagatgcgagagatgggcagagatggctactccgacagcgagcactacctccccatggaaggccagggccgggctgcctccatgccccgcctccctgcagagaaccagaggagaaggggccggccacgtgggaataacctcagtaccatctcagacaccagccccatgaagcgttcagcctccgtgctgggccccaaggcccgacgcctggacgattactcgctggagcgggtcccgcccgaggagaaccagcggcaccaccagcggcgccgcgaccgcagccaccgcgcctctgagcgctccctgggccgctacaccgatgtggacacaggcttggggacagacctgagcatgaccacccaatccggggacctgccgtcgaaggagcgggaccaggagcggggccggcccaaggatcggaagcatcgacagcaccaccaccaccaccaccaccaccaccatcccccgccccccgacaaggaccgctatgcccaggaacggccggaccacggccgggcacgggctcgggaccagcgctggtcccgctcgcccagcgagggccgagagcacatggcgcaccggcagtagttccgtaagtggaagcccagccccctcaacatctggtaccagcactccgcggcggggccgccgccagctcccccagaccccctccaccccccggccacacgtgtcctattcccctgtgatccgtaaggccggcggctcggggcccccgcagcagcagcagcagcagcaggcggtggccaggccgggccgggcggccaccagcggccctcggaggtacccaggccccacggccgagcctctggccggagatcggccgcccacggggggccacagcagcggccgctcgcccaggatggagaggcgggtcccaggcccggcccggagcgagtcccccagggcctgtcgacacggcggggcccggtggccggcatctggcccgcacgtgtccgaggggcccccgggtccccggcaccatggctactaccggggctccgactacgacgaggccgatggcccgggcagcgggggcggcgaggaggccatggccggggcctacgacgcgccaccccccgtacgacacgcgtcctcgggcgccaccgggcgctcgcccaggactccccgggcctcgggcccggcctgcgcctcgccttctcggcacggccggcgactccccaacggctactacccggcgcacggactggccaggccccgcgggccgggctccaggaagggcctgcacgaaccctacagcgagagtgacgatgattggtgctaagcccgggcgaggtggcgcccgcccggccccccacgcacc

SEQ ID NO: 36 - protein, 2266 aa, Human
MARFGDEMPARYGGGGSGAAAGVVVGSGGGRGAGGSRQGGQPGAQRMYKQSMAQRARTMALYNPIPVRQNCLTVNRSLFLFSEDNVVRKYAKKITEWPPFEYMILATIIANCIVLALEQHLPDDDKTPMSERLDDTEPYFIGIFCFEAGIKIIALGFAFHKGSYLRNGWNVMDFVVVLTGILATVGTEFDLRTLRAVRVLRPLKLVSGIPSLQVVLKSIMKAMIPLLQIGLLLFFAILIFAIIGLEFYMGKFHTTCFEEGTDDIQGESPAPCGTEEPARTCPNGTKCQPYWEGPNNGITQFDNILFAVLTVFQCITMEGWTDLLYNSNDASGNTWNWLYFIPLIIIGSFFMLNLVLGVLSGEFAKERERVENRRAFLKLRRQQQIERELNGYMEWISKAEEVILAEDETDGEQRHPFDGALRRTTIKKSKTDLLNPEEAEDQLADIASVGSPFARASIKSAKLENSTFFHKKERRMRFYIRRMVKTQAFYWTVLSLVALNTLCVAIVHYNQPEWLSDFLYYAEFIFLGLFMSEMFIKMYGLGTRPYFHSSFNCFDCGVIIGSIFEVIWAVIKPGTSFGISVLRALRLLRIFKVTKYWASLRNLVVSLLNSMKSIISLLFLLFLFIVVFALLGMQLFGGQFNFDEGTPPTNFDTFPAAIMTVFQILTGEDWNEVMYDGIKSQGGVQGGMVFSIYFIVLTLFGNYTLLNVFLAIAVDNLANAQELTKVEADEQEEEEAANQKLALQKAKEVAEVSPLSAANMSIAVKEQQKNQKPAKSVWEQRTSEMRKQNLLASREALYNEMDPDERWKAAYTRHLRPDMKTHLDRPLVVDPQENRNNNTNKSRAAEPTVDQRLGQQRAEDFLRKQARYHDRARDPSGSAGLDARRPWAGSQEAELSREGPYGRESDHHAREGSLEQPGFWEGEAERGKAGDPHRRHVHRQGGSRESRSGSPRTGADGEHRRHRAHRRPGEEGPEDKAERRARHREGSRPARGGEGEGEGPDGGERRRRHRHGAPATYEGDARREDKERRHRRRKENQGSGVPVSGPNLSTTRPIQQDLGRQDPPLAEDIDNMKNNKLATAESAAPHGSLGHAGLPQSPAKMGNSTDPGPMLAIPAMATNPQNAASRRTPNNPGNPSNPGPPKTPENSLIVTNPSGTQTNSAKTARKPDHTTVDIPPACPPPLNHTVVQVNKNANPDPLPKKEEEKKEEEEDDRGEDGPKPMPPYSSMFILSTTNPLRRLCHYILNLRYFEMCILMVIAMSSIALAAEDPVQPNAPRNNVLRYFDYVFTGVFTFEMVIKMIDLGLVLHQGAYFRDLWNILDFIVVSGALVAFAFTGNSKGKDINTIKSLRVLRVLRPLKTIKRLPKLKAVFDCVVNSLKNVFNILIVYMLFMFIFAVVAVQLFKGKFFHCTDESKEFEKDCRGKYLLYEKNEVKARDREWKKYEFHYDNVLWALLTLFTVSTGEGWPQVLKHSVDATFENQGPSPGYRMEMSIFYVVYFVVFPFFFVNIFVALIIITFQEQGDKMMEEYSLEKNERACIDFAISAKPLTRHMPQNKQSFQYRMWQFVVSPPFEYTIMAMIALNTIVLMMKFYGASVAYENALRVFNIVFTSLFSLECVLKVMAFGILNYFRDAWNIFDFVTVLGSITDILVTEFGNPNNFINLSFLRLFRAARLIKLLRQGYTIRILLWTFVQSFKALPYVCLLIAMLFFIYAIIGMQVFGNIGIDVEDEDSDEDEFQITEHNNFRTFFQALMLLFRSATGEAWHNIMLSCLSGKPCDKNSGILTRECGNEFAYFYFVSFIFLCSFLMLNLFVAVIMDNFEYLTRDSSILGPHHLDEYVRVWAEYDPAAWGRMPYLDMYQMLRHMSPPLGLGKKCPARVAYKRLLRMDLPVADDNTVHFNSTLMALIRTALDIKIAKGGADKQQMDAELRKEMMAIWPNLSQKTLDLLVTPHKSTDLTVGKIYAAMMIMEYYRQSKAKKLQAMREEQDRTPLMFQRMEPPSPTGEGGPGQNALPSTQLDPGGALMAHESGLKESPSWVTQRAQEMFQKTGTWSPEQGPPTDMPNSQPNSQSVEMREMGRDGYSDSEHYLPMEGQGRAASMPRLPAENQRRRGRPRGNNLSTISDTSPMKRSASVLGPKARRLDDYSLERVPPEENQRHHQRRRDRSHRASERSLGRYTDVDTGLGTDLSMTTQSGDLPSKERDQERGRPKDRKHRQHHHHHHHHHHPPPPDKDRYAQERPDHGRARARDQRWSRSPSEGREHMAHRQ

SEQ ID NO: 37 - DNA, 7032 bp, Human
  CDS (166)...(6921): standard name = Alpha-1E-1
gctgctgctgcctctccgaagagctcgcggagctccccagaggcggtggtccccgtgcttgtctggatgcggctctgagtctccgtgtgtctttctgcttgttgctgtgtgcgggtgttcggccgcgatcacctttgtgtgtcttctgtctgtttaaacctcaggatggctcgcttcggggaggcggtggtcgccaggccagggtccggcgatggagactcggaccagagcaggaaccggcaaggaacccccgtgccggcctcggggcaggcggccgcctacaagcagacgaaagcacagagggcgcggactatggctttgtacaaccccattcccgtccggcagaactgtttcaccgtcaacagatccctgttcatcttcggagaagataacattgtcaggaaatatgccaagaagctcatcgattggccgccatttgagtacatgatcctggccaccatcattgccaactgcatcgtcctggccctggagcagcatcttcctgaggatgacaagacccccatgtcccgaagactggagaagacagaaccttatttcattgggatcttttgctttgaagctgggatcaaaattgtggccctggggttcatcttccataagggctcttacctccgcaatggctggaatgtcatggacttcatcgtggtcctcagtggcatcctggccactgcaggaacccacttcaatactcacgtggacctgaggaccctccgggctgtgcgtgtcctgcggcctttgaagctcgtgtcagggatacctagcctgcagattgtgttgaagtccatcatgaaggccatggtacctcttctgcagattggccttctgctcttctttgccatcctgatgtttgctatcattggtttggagttctacagtggcaagttacatcgagcgtgcttcatgaacaattcaggtattctagaaggatttgacccccctcacccatgtggtgtgcagggctgcccagctggttatgaatgcaaggactggatcggccccaatgatgggatcacccagtttgataacatcctttttgctgtgctgactgtcttccagtgcatcaccatggaagggtggaccactgtgctgtacaataccaatgatgccttaggagccacctggaattggctgtacttcatccccctcatcatcattggatccttctttgttctcaacctagtcctgggagtgctttccggggaatttgccaaagagagagagagagtggagaaccgaagggctttcatgaagctgcggcgccagcagcagattgagcgtgagctgaatggctaccgtgcctggatagacaaagcagaggaagtcatgctcgctgaagaaaataaaaatgctggaacatccgccttagaagtgcttcgaagggcaaccatcaagaggagccggacagaggccatgactcgagactccagtgatgagcactgtgttgatatctcctctgtgggcacacctctggcccgagccagtatcaaaagtgcaaaggtagacggggtctcttatttccggcacaaggaaaggcttctgcgcatctccattcgccacatggttaaatcccaggtgttttactggattgtgctgagccttgtggcactcaacactgcctgtgtggccattgtccatcacaaccagccccagtggctcacccacctcctctactatgcagaatttctgtttctgggactcttcctcttggagatgtccctgaagatgtatggcatggggcctcgcctttattttcactcttcattcaactgctttgattttggggtcacagtgggcagtatctttgaagtggtctgggcaatcttcagacctggtacgtcttttggaatcagtgtcttgcgagccctccggcttctaagaatatttaaaataaccaagtattgggcttccctacggaatttggtggtctccttgatgagctcaatgaagtctatcatcagtttgcttttcctcctcttcctcttcatcgttgtctttgctctcctaggaatgcagttatttggaggcaggtttaactttaatgatgggactccttcggcaaattttgataccttccctgcagccatcatgactgtgttccagatcctgacgggtgaggactggaatgaggtgatgtacaatgggatccgctcccagggtggggtcagctcaggcatgtggtctgccatctacttcattgtgctcaccttgtttggcaactacacgctactgaatgtgttcttggctatcgctgtggataatctcgccaacgcccaggaactgaccaaggatgaacaggaggaagaagaggccttcaaccagaaacatgcactgcagaaggccaaggaggtcagcccgatgtctgcacccaacatgccttcgatcgagagggagcggaggcgccggcaccacatgtccgtgtgggagcagcgtaccagccagctgaggaagcacatgcagatgtccagccaggaggccctcaacagagaggaggcgccgaccatgaacccgctcaaccccctcaacccgctcagctccctcaacccgctcaatgcccaccccagcctttatcggcgacccagggccattgagggcctggccctgggcctggccctggagaagttcgaggaggagcgcatcagccgtggggggtccctcaagggggatggaggggaccgatccagtgccctggacaaccagaggacccctttgtccctgggccagcgggagccaccatggctggccaggccctgtcatggaaactgtgacccgactcagcaggaggcagggggaggagaggctgtggtgacctttgaggaccgggccaggcacaggcagagccaacggcgcagccggcatcgccgcgtcaggacagaaggcaaggagtcctcttcagcctcccggagcaggtctgccagccaggaacgcagtctggatgaagccatgcccactgaaggggagaaggaccatgagctcaggggcaaccatggtgccaaggagccaacgatccaagaagagagagcccaggatttaaggaggaccaacagtctgatggtgtccagaggctccgggctggcaggaggccttgatgaggctgacacccccctagtcctgccccatcctgagctggaagtggggaagcacgtggtgctgacggagcaggagccagaaggcagcagtgagcaggccctgctggggaatgtgcagctagacatgggccgggtcatcagccagagcgagcctgacctctcctgcatcacggccaacacggacaaggccaccaccgagagcaccagcgtcaccgtcgccatccccgacgtggaccccttggtggactcaaccgtggtgcacattagcaacaagacggatggggaagccagtcccttgaaggaggcagagatcagagaggatgaggaggaggtggagaagaagaagcagaagaaggagaagcgtgagacaggcaaagccatggtgccccacagctcaatgttcatcttcagcaccaccaacccgatccggagggcctgccactacatcgtgaacctgcgctactttgagatgtgcatcctcctggtgattgcagccagcagcatcgccctggcggcagaggaccccgtcctgaccaactcggagcgcaacaaagtcctgaggtattttgactatgtgttcacgggcgtgttcacctttgagatggttataaagatgatagaccaaggcttgatcctgcaggatgggtcctacttccgagacttgtggaacatcctggactttgtggtggtcgttggcgcattggtggcctttgctctggcgaacgctttgggaaccaacaaaggacgggacatcaagaccatcaagtctctgcgggtgctccgagttctaaggccactgaaaaccatcaagcgcttgcccaagctcaaggccgtcttcgactgcgtagtgacctccttgaagaatgtcttcaacatactcattgtgtacaagctcttcatgttcatctttgctgtcatcgcagttcagctcttcaagggaaagttcttttattgcacggacagttccaaggacacagagaaggagtgcataggcaactatgtagatcacgagaaaaacaagatggaggtgaagggccgggaatggaagcgccatgaattccactacgacaacattatctgggccctgctgaccctcttcaccgtctccacaggggaaggatggcctcaagttctgcagcactctgtagatgtgacagaggaagaccgaggcccaagccgcagcaaccgcatggagatgtctatcttttatgtagtctactttgtggtcttccccttcttctttgtcaatatctttgtggctctcatcatcatcaccttccaggagcaaggggataagatgatggaggagtgcagcctggagaagaatgagagggcgtgcatcgacttcgccatcagcgccaaacctctcacccgctacatgccgcagaacagacacaccttccagtaccgcgtgtggcactttgtggtgtctccgtcctttgagtacaccattatggccatgatcgccttgaatactgttgtgctgatgatgaagtattattctgctccctgtacctatgagctggccctgaagtacctgaatatcgccttcaccatggtgttttccctggaatgtgtcctgaaggtcatcgcttttggctttttgaactatttccgagacacctggaatatctttgacttcatcaccgtgattggcagtatcacagaaattatcctgacagacagcaagctggtgaacaccagtggcttcaatatgagctttctgaagctcttccgagctgcccgcctcataaagctcctgcgtcagggctataccatacgcattttgctgtggacctttgtgcagtcctttaaggccctcccttatgtctgccttttaattgccatgcttttcttcatttatgccatcattgggatgcaggtatttggaaacataaaattagacgaggagagtcacatcaaccggcacaacaacttccggagtttctttgggtccctaatgctactcttcaggagtgccacaggtgaggcctggcaggagattatgctgtcatgccttggggagaagggctgtgagcctgacaccaccgcaccatcagggcagaacgagaatgaacgctgcggcaccgatctggcctacgtgtactttgtctccttcatcttcttctgctccttcttgatgctcaacctgtttgtggccgtcatcatggacaactttgagtacctgactcgggactcctccatcctggggcctcaccacttggacgagtttgtccgcgtctgggcagaatatgaccgagcagcatgtggccgcatccattacactgagatgtatgaaatgctgactctcatgtcacctccgctaggcctcggcaagagatgtccctccaaagtggcatataagaggttggtcctgatgaacatgccagtagctgaggacatgacggtccacttcacctccacacttatggctctgatccggacagctctggacattaaaattgccaaaggtggtgcagacaggcagcagctagactcagagctacaaaaggagaccctagccatctggcctcacctatcccagaagatgctggatctgcttgtgcccatgcccaaagcctctgacctgactgtgggcaaaatctatgcagcaatgatgatcatggactactataagcagagtaaggtgaagaagcagaggcagcagctggaggaacagaaaaatgcccccatgttccagcgcatggagccttcatctctgcctcaggagatcattgctaatgccaaagccctgccttacctccagcaggaccccgtttcaggcctgagtggccggagtggatacccttcgatgagtccactctctccccaggatatattccagttggcttgtatggaccccgccgatgacggacagttccaagaacggcagtctctggtggtgacagaccctagctccatgagacgttcattttccactattcgggataagcgttcaaattcctcgtggttggaggaattctccatggagcgaagcagtgaaaatacctacaagtcccgtcgccggagttaccactcctccttgcggctgtcagcccaccgcctgaactctgattcaggccacaagtctgacactcacccctcagggggcagggagcggcgacgatcaaaagagcgaaagcatcttctctctcctgatgtctcccgctgcaattcagaagagcgagggacccaggctgactgggagtccccagagcgccgtcaatccaggtcacccagtgagggcaggtcacagacgcccaacagacagggcacaggttccctaagtgagagctccatcccctctgtctctgacaccagcaccccaagaagaagtcgtcggcagctcccacccgtcccgccaaagccccggcccctcctttcctacagctccctgattcgacacgcgggcagcatctctccacctgctgatggaagcgaggagggctccccgctgacctcccaagctctggagagcaacaatgcttggctgaccgagtcttccaactctccgcacccccagcagaggcaacatgcctccccacagcgctacatctccgagccctacttggccctgcacgaagactcccacgcctcagactgtgttgaggaggagacgctcactttcgaagcagccgtggctactagcctgggccgttccaacaccatcggctcagccccacccctgcggcatagctggcagatgcccaacgggcactatcggcggcggaggcgcggggggcctgggccaggcatgatgtgtggggctgtcaacaacctgctaagtgacacggaagaagatgacaaatgctagaggctgctcccccctccgatgcatgctcttctctcacatggagaaaaccaagacagaattgggaagccagtgcggccccgcggggaggaagagggaaaaggaagatggaag

SEQ ID NO: 38 - protein, 2251 aa, Human
MARFGEAVVARPGSGDGDSDQSRNRQGTPVPASGQAAAYKQTKAQRARTMALYNPIPVRQNCFTVNRSLFIFGEDNIVRKYAKKLIDWPPFEYMILATIIANCIVLALEQHLPEDDKTPMSRRLEKTEPYFIGIFCFEAGIKIVALGFIFHKGSYLRNGWNVMDFIVVLSGILATAGTHFNTHVDLRTLRAVRVLRPLKLVSGIPSLQIVLKSIMKAMVPLLQIGLLLFFAILMFAIIGLEFYSGKLHRACFMNNSGILEGFDPPHPCGVQGCPAGYECKDWIGPNDGITQFDNILFAVLTVFQCITMEGWTTVLYNTNDALGATWNWLYFIPLIIIGSFFVLNLVLGVLSGEFAKERERVENRRAFMKLRRQQQIERELNGYRAWIDKAEEVMLAEENKNAGTSALEVLRRATIKRSRTEAMTRDSSDEHCVDISSVGTPLARASIKSAKVDGVSYFRHKERLLRISIRHMVKSQVFYWIVLSLVALNTACVAIVHHNQPQWLTHLLYYAEFLFLGLFLLEMSLKMYGMGPRLYFHSSFNCFDFGVTVGSIFEVVWAIFRPGTSFGISVLRALRLLRIFKITKYWASLRNLVVSLMSSMKSIISLLFLLFLFIVVFALLGMQLFGGRFNFNDGTPSANFDTFPAAIMTVFQILTGEDWNEVMYNGIRSQGGVSSGMWSAIYFIVLTLFGNYTLLNVFLAIAVDNLANAQELTKDEQEEEEAFNQKHALQKAKEVSPMSAPNMPSIERERRRRHHMSVWEQRTSQLRKHMQMSSQEALNREEAPTMNPLNPLNPLSSLNPLNAHPSLYRRPRAIEGLALGLALEKFEEERISRGGSLKGDGGDRSSALDNQRTPLSLGQREPPWLARPCHGNCDPTQQEAGGGEAVVTFEDRARHRQSQRRSRHRRVRTEGKESSSASRSRSASQERSLDEAMPTEGEKDHELRGNHGAKEPTIQEERAQDLRRTNSLMVSRGSGLAGGLDEADTPLVLPHPELEVGKHVVLTEQEPEGSSEQALLGNVQLDMGRVISQSEPDLSCITANTDKATTESTSVTVAIPDVDPLVDSTVVHISNKTDGEASPLKEAEIREDEEEVEKKKQKKEKRETGKAMVPHSSMFIFSTTNPIRRACHYIVNLRYFEMCILLVIAASSIALAAEDPVLTNSERNKVLRYFDYVFTGVFTFEMVIKMIDQGLILQDGSYFRDLWNILDFVVVVGALVAFALANALGTNKGRDIKTIKSLRVLRVLRPLKTIKRLPKLKAVFDCVVTSLKNVFNILIVYKLFMFIFAVIAVQLFKGKFFYCTDSSKDTEKECIGNYVDHEKNKMEVKGREWKRHEFHYDNIIWALLTLFTVSTGEGWPQVLQHSVDVTEEDRGPSRSNRMEMSIFYVVYFVVFPFFFVNIFVALIIITFQEQGDKMMEECSLEKNERACIDFAISAKPLTRYMPQNRHTFQYRVWHFVVSPSFEYTIMAMIALNTVVLMMKYYSAPCTYELALKYLNIAFTMVFSLECVLKVIAFGFLNYFRDTWNIFDFITVIGSITEIILTDSKLVNTSGFNMSFLKLFRAARLIKLLRQGYTIRILLWTFVQSFKALPYVCLLIAMLFFIYAIIGMQVFGNIKLDEESHINRHNNFRSFFGSLMLLFRSATGEAWQEIMLSCLGEKGCEPDTTAPSGQNENERCGTDLAYVYFVSFIFFCSFLMLNLFVAVIMDNFEYLTRDSSILGPHHLDEFVRVWAEYDRAACGRIHYTEMYEMLTLMSPPLGLGKRCPSKVAYKRLVLMNMPVAEDMTVHFTSTLMALIRTALDIKIAKGGADRQQLDSELQKETLAIWPHLSQKMLDLLVPMPKASDLTVGKIYAAMMIMDYYKQSKVKKQRQQLEEQKNAPMFQRMEPSSLPQEIIANAKALPYLQQDPVSGLSGRSGYPSMSPLSPQDIFQLACMDPADDGQFQERQSLVVTDPSSMRRSFSTIRDKRSNSSWLEEFSMERSSENTYKSRRRSYHSSLRLSAHRLNSDSGHKSDTHPSGGRERRRSKERKHLLSPDVSRCNSEERGTQADWESPERRQSRSPSEGRSQTPNRQGTGSLSESSIPSVSDTSTPRRSRRQLPPVPPKPRPLLSYSSLIRHAGSISPPADGSEEGSPLTSQALESNNAWLTESSNSPHPQQRQHASPQRYISEPYLALHEDSHASDCVEEETLTFEAAVATSLGRSNTIGSAPPLRHSWQMPNGHYRRRRRGGPGPGMMCGAVNNLLSDTEEDDKC

SEQ ID NO: 39 - DNA, 7089 bp, Human
  CDS (166)...(6978): standard name = Alpha-1E-3
gctgctgctgcctctccgaagagctcgcggagctccccagaggcggtggtccccgtgcttgtctggatgcggctctgagtctccgtgtgtctttctgcttgttgctgtgtgcgggtgttcggccgcgatcacctttgtgtgtcttctgtctgtttaaacctcaggatggctcgcttcggggaggcggtggtcgccaggccagggtccggcgatggagactcggaccagagcaggaaccggcaaggaacccccgtgccggcctcggggcaggcggccgcctacaagcagacgaaagcacagagggcgcggactatggctttgtacaaccccattcccgtccggcagaactgtttcaccgtcaacagatccctgttcatcttcggagaagataacattgtcaggaaatatgccaagaagctcatcgattggccgccatttgagtacatgatcctggccaccatcattgccaactgcatcgtcctggccctggagcagcatcttcctgaggatgacaagacccccatgtcccgaagactggagaagacagaaccttatttcattgggatcttttgctttgaagctgggatcaaaattgtggccctggggttcatcttccataagggctcttacctccgcaatggctggaatgtcatggacttcatcgtggtcctcagtggcatcctggccactgcaggaacccacttcaatactcacgtggacctgaggaccctccgggctgtgcgtgtcctgcggcctttgaagctcgtgtcagggatacctagcctgcagattgtgttgaagtccatcatgaaggccatggtacctcttctgcagattggccttctgctcttctttgccatcctgatgtttgctatcattggtttggagttctacagtggcaagttacatcgagcgtgcttcatgaacaattcaggtattctagaaggatttgacccccctcacccatgtggtgtgcagggctgcccagctggttatgaatgcaaggactggatcggccccaatgatgggatcacccagtttgataacatcctttttgctgtgctgactgtcttccagtgcatcaccatggaagggtggaccactgtgctgtacaataccaatgatgccttaggagccacctggaattggctgtacttcatccccctcatcatcattggatccttctttgttctcaacctagtcctgggagtgctttccggggaatttgccaaagagagagagagagtggagaaccgaagggctttcatgaagctgcggcgccagcagcagattgagcgtgagctgaatggctaccgtgcctggatagacaaagcagaggaagtcatgctcgctgaagaaaataaaaatgctggaacatccgccttagaagtgcttcgaagggcaaccatcaagaggagccggacagaggccatgactcgagactccagtgatgagcactgtgttgatatctcctctgtgggcacacctctggcccgagccagtatcaaaagtgcaaaggtagacggggtctcttatttccggcacaaggaaaggcttctgcgcatctccattcgccacatggttaaatcccaggtgttttactggattgtgctgagccttgtggcactcaacactgcctgtgtggccattgtccatcacaaccagccccagtggctcacccacctcctctactatgcagaatttctgtttctgggactcttcctcttggagatgtccctgaagatgtatggcatggggcctcgcctttattttcactcttcattcaactgctttgattttggggtcacagtgggcagtatctttgaagtggtctgggcaatcttcagacctggtacgtcttttggaatcagtgtcttgcgagccctccggcttctaagaatatttaaaataaccaagtattgggcttccctacggaatttggtggtctccttgatgagctcaatgaagtctatcatcagtttgcttttcctcctcttcctcttcatcgttgtctttgctctcctaggaatgcagttatttggaggcaggtttaactttaatgatgggactccttcggcaaattttgataccttccctgcagccatcatgactgtgttccagatcctgacgggtgaggactggaatgaggtgatgtacaatgggatccgctcccagggtggggtcagctcaggcatgtggtctgccatctacttcattgtgctcaccttgtttggcaactacacgctactgaatgtgttcttggctatcgctgtggataatctcgccaacgcccaggaactgaccaaggatgaacaggaggaagaagaggccttcaaccagaaacatgcactgcagaaggccaaggaggtcagcccgatgtctgcacccaacatgccttcgatcgaaagagacagaaggagaagacaccacatgtcgatgtgggagccacgcagcagccacctgagggagcggaggcgccggcaccacatgtccgtgtgggagcagcgtaccagccagctgaggaagcacatgcagatgtccagccaggaggccctcaacagagaggaggcgccgaccatgaacccgctcaaccccctcaacccgctcagctccctcaacccgctcaatgcccaccccagcctttatcggcgacccagggccattgagggcctggccctgggcctggccctggagaagttcgaggaggagcgcatcagccgtggggggtccctcaagggggatggaggggaccgatccagtgccctggacaaccagaggacccctttgtccctgggccagcgggagccaccatggctggccaggccctgtcatggaaactgtgacccgactcagcaggaggcagggggaggagaggctgtggtgacctttgaggaccgggccaggcacaggcagagccaacggcgcagccggcatcgccgcgtcaggacagaaggcaaggagtcctcttcagcctcccggagcaggtctgccagccaggaacgcagtctggatgaagccatgcccactgaaggggagaaggaccatgagctcaggggcaaccatggtgccaaggagccaacgatccaagaagagagagcccaggatttaaggaggaccaacagtctgatggtgtccagaggctccgggctggcaggaggccttgatgaggctgacacccccctagtcctgccccatcctgagctggaagtggggaagcacgtggtgctgacggagcaggagccagaaggcagcagtgagcaggccctgctggggaatgtgcagctagacatgggccgggtcatcagccagagcgagcctgacctctcctgcatcacggccaacacggacaaggccaccaccgagagcaccagcgtcaccgtcgccatccccgacgtggaccccttggtggactcaaccgtggtgcacattagcaacaagacggatggggaagccagtcccttgaaggaggcagagatcagagaggatgaggaggaggtggagaagaagaagcagaagaaggagaagcgtgagacaggcaaagccatggtgcccgacagctcaatgttcatcttcagcaccaccaacccgatccggagggcctgccactacatcgtgaacctgcgctactttgagatgtgcatcctcctggtgattgcagccagcagcatcgccctggcggcagaggaccccgtcctgaccaactcggagcgcaacaaagtcctgaggtattttgactatgtgttcacgggcgtgttcacctttgagatggttataaagatgatagaccaaggcttgatcctgcaggatgggtcctacttccgagacttgtggaacatcctggactttgtggtggtcgttggcgcattggtggcctttgctctggcgaacgctttgggaaccaacaaaggacgggacatcaagaccatcaagtctctgcgggtgctccgagttctaaggccactgaaaaccatcaagcgcttgcccaagctcaaggccgtcttcgactgcgtagtgacctccttgaagaatgtcttcaacatactcattgtgtacaagctcttcatgttcatctttgctgtcatcgcagttcagctcttcaagggaaagttcttttattgcacggacagttccaaggacacagagaaggagtgcataggcaactatgtagatcacgagaaaaacaagatggaggtgaagggccgggaatggaagcgccatgaattccactacgacaacattatctgggccctgctgaccctcttcaccgtctccacaggggaaggatggcctcaagttctgcagcactctgtagatgtgacagaggaagaccgaggcccaagccgcagcaaccgcatggagatgtctatcttttatgtagtctactttgtggtcttccccttcttctttgtcaatatctttgtggctctcatcatcatcaccttccaggagcaaggggataagatgatggaggagtgcagcctggagaagaatgagagggcgtgcatcgacttcgccatcagcgccaaacctctcacccgctacatgccgcagaacagacacaccttccagtaccgcgtgtggcactttgtggtgtctccgtcctttgagtacaccattatggccatgatcgccttgaatactgttgtgctgatgatgaagtattattctgctccctgtacctatgagctggccctgaagtacctgaatatcgccttcaccatggtgttttccctggaatgtgtcctgaaggtcatcgcttttggctttttgaactatttccgagacacctggaatatctttgacttcatcaccgtgattggcagtatcacagaaattatcctgacagacagcaagctggtgaacaccagtggcttcaatatgagctttctgaagctcttccgagctgcccgcctcataaagctcctgcgtcagggctataccatacgcattttgctgtggacctttgtgcagtcctttaaggccctcccttatgtctgccttttaattgccatgcttttcttcatttatgccatcattgggatgcaggtatttggaaacataaaattagacgaggagagtcacatcaaccggcacaacaacttccggagtttctttgggtccctaatgctactcttcaggagtgccacaggtgaggcctggcaggagattatgctgtcatgccttggggagaagggctgtgagcctgacaccaccgcaccatcagggcagaacgagaatgaacgctgcggcaccgatctggcctacgtgtactttgtctccttcatcttcttctgctccttcttgatgctcaacctgtttgtggccgtcatcatggacaactttgagtacctgactcgggactcctccatcctggggcctcaccacttggacgagtttgtccgcgtctgggcagaatatgaccgagcagcatgtggccgcatccattacactgagatgtatgaaatgctgactctcatgtcacctccgctaggcctcggcaagagatgtccctccaaagtggcatataagaggttggtcctgatgaacatgccagtagctgaggacatgacggtccacttcacctccacacttatggctctgatccggacagctctggacattaaaattgccaaaggtggtgcagacaggcagcagctagactcagagctacaaaaggagaccctagccatctggcctcacctatcccagaagatgctggatctgcttgtgcccatgcccaaagcctctgacctgactgtgggcaaaatctatgcagcaatgatgatcatggactactataagcagagtaaggtgaagaagcagaggcagcagctggaggaacagaaaaatgcccccatgttccagcgcatggagccttcatctctgcctcaggagatcattgctaatgccaaagccctgccttacctccagcaggaccccgtttcaggcctgagtggccggagtggatacccttcgatgagtccactctctccccaggatatattccagttggcttgtatggaccccgccgatgacggacagttccaagaacggcagtctctggtggtgacagaccctagctccatgagacgttcattttccactattcgggataagcgttcaaattcctcgtggttggaggaattctccatggagcgaagcagtgaaaatacctacaagtcccgtcgccggagttaccactcctccttgcggctgtcagcccaccgcctgaactctgattcaggccacaagtctgacactcacccctcagggggcagggagcggcgacgatcaaaagagcgaaagcatcttctctctcctgatgtctcccgctgcaattcagaagagcgagggacccaggctgactgggagtccccagagcgccgtcaatccaggtcacccagtgagggcaggtcacagacgcccaacagacagggcacaggttccctaagtgagagctccatcccctctgtctctgacaccagcaccccaagaagaagtcgtcggcagctcccacccgtcccgccaaagccccggcccctcctttcctacagctccctgattcgacacgcgggcagcatctctccacctgctgatggaagcgaggagggctccccgctgacctcccaagctctggagagcaacaatgcttggctgaccgagtcttccaactctccgcacccccagcagaggcaacatgcctccccacagcgctacatctccgagccctacttggccctgcacgaagactcccacgcctcagactgtgttgaggaggagacgctcactttcgaagcagccgtggctactagcctgggccgttccaacaccatcggctcagccccacccctgcggcatagctggcagatgcccaacgggcactatcggcggcggaggcgcggggggcctgggccaggcatgatgtgtggggctgtcaacaacctgctaagtgacacggaagaagatgacaaatgctagaggctgctcccccctccgatgcatgctcttctctcacatggagaaaaccaagacagaattgggaagccagtgcggccccgcggggaggaagagggaaaaggaagatggaag

SEQ ID NO: 40 - protein, 2270 aa, Human
MARFGEAVVARPGSGDGDSDQSRNRQGTPVPASGQAAAYKQTKAQRARTMALYNPIPVRQNCFTVNRSLFIFGEDNIVRKYAKKLIDWPPFEYMILATIIANCIVLALEQHLPEDDKTPMSRRLEKTEPYFIGIFCFEAGIKIVALGFIFHKGSYLRNGWNVMDFIVVLSGILATAGTHFNTHVDLRTLRAVRVLRPLKLVSGIPSLQIVLKSIMKAMVPLLQIGLLLFFAILMFAIIGLEFYSGKLHRACFMNNSGILEGFDPPHPCGVQGCPAGYECKDWIGPNDGITQFDNILFAVLTVFQCITMEGWTTVLYNTNDALGATWNWLYFIPLIIIGSFFVLNLVLGVLSGEFAKERERVENRRAFMKLRRQQQIERELNGYRAWIDKAEEVMLAEENKNAGTSALEVLRRATIKRSRTEAMTRDSSDEHCVDISSVGTPLARASIKSAKVDGVSYFRHKERLLRISIRHMVKSQVFYWIVLSLVALNTACVAIVHHNQPQWLTHLLYYAEFLFLGLFLLEMSLKMYGMGPRLYFHSSFNCFDFGVTVGSIFEVVWAIFRPGTSFGISVLRALRLLRIFKITKYWASLRNLVVSLMSSMKSIISLLFLLFLFIVVFALLGMQLFGGRFNFNDGTPSANFDTFPAAIMTVFQILTGEDWNEVMYNGIRSQGGVSSGMWSAIYFIVLTLFGNYTLLNVFLAIAVDNLANAQELTKDEQEEEEAFNQKHALQKAKEVSPMSAPNMPSIERDRRRRHHMSMWEPRSSHLRERRRRHHMSVWEQRTSQLRKHMQMSSQEALNREEAPTMNPLNPLNPLSSLNPLNAHPSLYRRPRAIEGLALGLALEKFEEERISRGGSLKGDGGDRSSALDNQRTPLSLGQREPPWLARPCHGNCDPTQQEAGGGEAVVTFEDRARHRQSQRRSRHRRVRTEGKESSSASRSRSASQERSLDEAMPTEGEKDHELRGNHGAKEPTIQEERAQDLRRTNSLMVSRGSGLAGGLDEADTPLVLPHPELEVGKHVVLTEQEPEGSSEQALLGNVQLDMGRVISQSEPDLSCITANTDKATTESTSVTVAIPDVDPLVDSTVVHISNKTDGEASPLKEAEIREDEEEVEKKKQKKEKRETGKAMVPHSSMFIFSTTNPIRRACHYIVNLRYFEMCILLVIAASSIALAAEDPVLTNSERNKVLRYFDYVFTGVFTFEMVIKMIDQGLILQDGSYFRDLWNILDFVVVVGALVAFALANALGTNKGRDIKTIKSLRVLRVLRPLKTIKRLPKLKAVFDCVVTSLKNVFNILIVYKLFMFIFAVIAVQLFKGKFFYCTDSSKDTEKECIGNYVDHEKNKMEVKGREWKRHEFHYDNIIWALLTLFTVSTGEGWPQVLQHSVDVTEEDRGPSRSNRMEMSIFYVVYFVVFPFFFVNIFVALIIITFQEQGDKMMEECSLEKNERACIDFAISAKPLTRYMPQNRHTFQYRVWHFVVSPSFEYTIMAMIALNTVVLMMKYYSAPCTYELALKYLNIAFTMVFSLECVLKVIAFGFLNYFRDTWNIFDFITVIGSITEIILTDSKLVNTSGFNMSFLKLFRAARLIKLLRQGYTIRILLWTFVQSFKALPYVCLLIAMLFFIYAIIGMQVFGNIKLDEESHINRHNNFRSFFGSLMLLFRSATGEAWQEIMLSCLGEKGCEPDTTAPSGQNENERCGTDLAYVYFVSFIFFCSFLMLNLFVAVIMDNFEYLTRDSSILGPHHLDEFVRVWAEYDRAACGRIHYTEMYEMLTLMSPPLGLGKRCPSKVAYKRLVLMNMPVAEDMTVHFTSTLMALIRTALDIKIAKGGADRQQLDSELQKETLAIWPHLSQKMLDLLVPMPKASDLTVGKIYAAMMIMDYYKQSKVKKQRQQLEEQKNAPMFQRMEPSSLPQEIIANAKALPYLQQDPVSGLSGRSGYPSMSPLSPQDIFQLACMDPADDGQFQERQSLVVTDPSSMRRSFSTIRDKRSNSSWLEEFSMERSSENTYKSRRRSYHSSLRLSAHRLNSDSGHKSDTHPSGGRERRRSKERKHLLSPDVSRCNSEERGTQADWESPERRQSRSPSEGRSQTPNRQGTGSLSESSIPSVSDTSTPRRSRRQLPPVPPKPRPLLSYSSLIRHAGSISPPADGSEEGSPLTSQALESNNAWLTESSNSPHPQQRQHASPQRYISEPYLALHEDSHASDCVEEETLTFEAAVATSLGRSNTIGSAPPLRHSWQMPNGHYRRRRRGGPGPGMMCGAVNNLLSDTEEDDKC

SEQ ID NO: 41 - DNA, 2634 bp, Human
  CDS (1)...(1983): standard name = Beta-2d
atggtccaaagggacatgtccaagtctcctcccacaccggcggcggcggtggcgcaggagatccagatggaactgctagagaacgtggctcccgcgggggcgctcggagccgccgcacagtcatatggaaaaggagccagaaggaaaaacagatttaaaggatctgatggaagcacgtcatctgatactacctcaaatagttttgttcgccagggttcggcagactcctacactagccgtccatccgattccgatgtatctctggaggaggaccgggaggcagtgcgcagagaagcggagcggcaggcccaggcacagttggaaaaagcaaagacaaagcccgttgcatttgcggttcggacaaatgtcagctacagtgcggcccatgaagatgatgttccagtgcctggcatggccatctcattcgaagcaaaagattttctgcatgttaaggaaaaatttaacaatgactggtggatagggcgattggtaaaagaaggctgtgaaatcggattcattccaagcccagtcaaactagaaaacatgaggctgcagcatgaacagagagccaagcaagggaaattctactccagtaaatcaggaggaaattcatcatccagtttgggtgacatagtacctagttccagaaaatcaacacctccatcatctgctatagacatagatgctactggcttagatgcagaagaaaatgatattccagcaaaccaccgctcccctaaacccagtgcaaacagtgtaacgtcaccccactccaaagagaaaagaatgcccttctttaagaagacagagcacactcctccgtatgatgtggtaccttccatgcgaccagtggtcctagtgggcccttctctgaagggctacgaggtcacagatatgatgcaaaaagcgctgtttgattttttaaaacacagatttgaagggcggatatccatcacaagggtcaccgctgacatctcgcttgccaaacgctcggtattaaacaatcccagtaagcacgcaataatagaaagatccaacacaaggtcaagcttagcggaagttcagagtgaaatcgaaaggatttttgaacttgcaagaacattgcagttggtggtccttgacgcggatacaattaatcatccagctcaactcagtaaaacctccttggcccctattatagtatatgtaaagatttcttctcctaaggttttacaaaggttaataaaatctcgagggaaatctcaagctaaacacctcaacgtccagatggtagcagctgataaactggctcagtgtcctccagagctgttcgatgtgatcttggatgagaaccagcttgaggatgcctgtgagcaccttgccgactatctggaggcctactggaaggccacccatcctcccagcagtagcctccccaaccctctccttagccgtacattagccacttcaagtctgcctcttagccccaccctagcctctaattcacagggttctcaaggtgatcagaggactgatcgctccgctcctatccgttctgcttcccaagctgaagaagaacctagtgtggaaccagtcaagaaatcccagcaccgctcttcctcctcagccccacaccacaaccatcgcagtgggacaagtcgcggcctctccaggcaagagacatttgactcggaaacccaggagagtcgagactctgcctacgtagagccaaaggaagattattcccatgaccacgtggaccactatgcctcacaccgtgaccacaaccacagagacgagacccacgggagcagtgaccacagacacagggagtcccggcaccgttcccgggacgtggatcgagagcaggaccacaacgagtgcaacaagcagcgcagccgtcataaatccaaggatcgctactgtgaaaaggatggagaagtgatatcaaaaaaacggaatgaggctggggagtggaacagggatgtttacatcccccaatgagttttgcccttttgtgtttttttttttttttttttgaagtcttgtataactaacagcatccccaaaacaaaaagtctttggggtctacactgcaatcatatgtgatctgtcttgtaatattttgtattattgctgttgcttgaatagcaatagcatggatagagtattgagatactttttcttttgtaagtgctacataaattggcctggtatggctgcagtcctccggttgcatactggactcttcaaaaactgttttgggtagctgccacttgaacaaaatctgttgccacccaggtgatgttagtgttttaagaaatgtagttgatgtatccaacaagccagaatcagcacagataaaaagtggaatttcttgtttctccagatttttaatacgttaatacgcaggcatctgatttgcatattcattcatggaccactgtttcttgcttgtacctctggctgactaaatttggggacagattcagtcttgccttacacaaaggggatcataaagttagaatctattttctatgtactagtactgtgtactgtatagacagtttgtaaatgttatttctgcaaacaaacacctccttattatatataatatatatatatatatcagtttgatcacactattttagagtc

SEQ ID NO: 42 - protein, 660 aa, Human
MVQRDMSKSPPTPAAAVAQEIQMELLENVAPAGALGAAAQSYGKGARRKNRFKGSDGSTSSDTTSNSFVRQGSADSYTSRPSDSDVSLEEDREAVRREAERQAQAQLEKAKTKPVAFAVRTNVSYSAAHEDDVPVPGMAISFEAKDFLHVKEKFNNDWWIGRLVKEGCEIGFIPSPVKLENMRLQHEQRAKQGKFYSSKSGGNSSSSLGDIVPSSRKSTPPSSAIDIDATGLDAEENDIPANHRSPKPSANSVTSPHSKEKRMPFFKKTEHTPPYDVVPSMRPVVLVGPSLKGYEVTDMMQKALFDFLKHRFEGRISITRVTADISLAKRSVLNNPSKHAIIERSNTRSSLAEVQSEIERIFELARTLQLVVLDADTINHPAQLSKTSLAPIIVYVKISSPKVLQRLIKSRGKSQAKHLNVQMVAADKLAQCPPELFDVILDENQLEDACEHLADYLEAYWKATHPPSSSLPNPLLSRTLATSSLPLSPTLASNSQGSQGDQRTDRSAPIRSASQAEEEPSVEPVKKSQHRSSSSAPHHNHRSGTSRGLSRQETFDSETQESRDSAYVEPKEDYSHDHVDHYASHRDHNHRDETHGSSDHRHRESRHRSRDVDREQDHNECNKQRSRHKSKDRYCEKDGEVISKKRNEAGEWNRDVYIPQ

SEQ ID NO: 43 - DNA, 1823 bp, Human
  CDS (69)...(1631): standard name = Beta-4
agcccagcctcgggggccagccccctccgcccaccgcacacgggctggccatgcggcggctctgaacgatgtcctcctcctcctacgccaagaacgggaccgcggacgggccgcactcccccacctcgcaggtggcccgaggcaccacaacccggaggagcaggttgaaaagatccgatggcagcaccacttcgaccagcttcatcctcagacagggttcagcggattcctacacaagcaggccgtctgactccgatgtctctttggaagaggaccgggaagcaattcgacaggagagagaacagcaagcagctatccagcttgagagagcaaagtccaaacctgtagcatttgccgtgaagacaaatgtgagctactgcggcgccctggacgaggatgtgcctgttccaagcacagctatctcctttgatgctaaagactttctacatattaaagagaaatataacaatgattggtggataggaaggctggtgaaagagggctgtgaaattggcttcattccaagtccactcagattggagaacatacggatccagcaagaacaaaaaagaggacgttttcacggagggaaatcaagtggaaattcttcttcaagtcttggagaaatggtatctgggacattccgagcaactcccacatcaacagcaaaacagaagcaaaaagtgacggagcacattcctccttacgatgttgtaccgtcaatgcgtccggtggtgttagtggggccgtcactgaaaggttacgaggtaacagacatgatgcagaaagccctctttgattccctgaagcacaggtttgatgggaggatttcaataacgagagtgacagctgacatttctcttgctaagaggtctgtcctaaataatcccagcaagagagcaataattgaacgttcgaacacccggtccagcttagcggaagtacaaagtgaaattgaaagaatctttgagttggcaagatctttgcaactggttgttcttgatgcagacaccatcaatcacccagcacaacttataaagacttccttagcaccaattattgttcatgtaaaagtctcatctccaaaggttttacagcggttgattaaatctagaggaaagtcacaaagtaaacacttgaatgttcaactggtggcagctgataaacttgcacaatgccccccagaaatgtttgatgttatattggatgaaaatcagcttgaggatgcatgtgaacatctaggggagtacctggaggcgtactggcgtgccacccacacaaccagtagcacacccatgaccccgctgctgggaaggaatttgggctccacggcactctcaccatatcccacagcaatttctgggttacagagtcagcgaatgaggcacagcaaccactccacagagaactctccaattgaaagacgaagtctaatgacctctgatgaaaattatcacaatgaaagggctcggaagagtaggaaccgcttgtcttccagttctcagcatagccgagatcattaccctcttgtggaagaagattaccctgactcataccaggacacttacaaaccccataggaaccgaggatcacctgggggatatagccatgactcccgacataggctttgagtctaatgaaacaaaaaatattcatctgttgacaatttgccatagcagtgctaggataaaccaatcatcttaacttggctaacatagcacagtatttactgtgctaatgggctgctgtcattttatgctaagtaaggggcaaaaaaaaaaattacattatgcccttgagtctagatggatattagatgcccg

SEQ ID NO: 44 - protein, 520 aa, Human
MSSSSYAKNGTADGPHSPTSQVARGTTTRRSRLKRSDGSTTSTSFILRQGSADSYTSRPSDSDVSLEEDREAIRQEREQQAAIQLERAKSKPVAFAVKTNVSYCGALDEDVPVPSTAISFDAKDFLHIKEKYNNDWWIGRLVKEGCEIGFIPSPLRLENIRIQQEQKRGRFHGGKSSGNSSSSLGEMVSGTFRATPTSTAKQKQKVTEHIPPYDVVPSMRPVVLVGPSLKGYEVTDMMQKALFDSLKHRFDGRISITRVTADISLAKRSVLNNPSKRAIIERSNTRSSLAEVQSEIERIFELARSLQLVVLDADTINHPAQLIKTSLAPIIVHVKVSSPKVLQRLIKSRGKSQSKHLNVQLVAADKLAQCPPEMFDVILDENQLEDACEHLGEYLEAYWRATHTTSSTPMTPLLGRNLGSTALSPYPTAISGLQSQRMRHSNHSTENSPIERRSLMTSDENYHNERARKSRNRLSSSSQHSRDHYPLVEEDYPDSYQDTYKPHRNRGSPGGYSHDSRHRL

SEQ ID NO: 45 - protein, 504 aa, Human
MSSSSYAKNGTADGPHSPTSQVARGTTTRRSRLKRSDGSTTSTSFILRQGSADSYTSRPSDSDVSLEEDREAIRQEREQQAAIQLERAKSKPVAFAVKTNVSYCGALDEDVPVPSTAISFDAKDFLHIKEKYNNDWWIGRLVKERIQQEQKRGRFHGGKSSGNSSSSLGEMVSGTFRATPTSTAKQKQKVTEHIPPYDVVPSMRPVVLVGPSLKGYEVTDMMQKALFDSLKHRFDGRISITRVTADISLAKRSVLNNPSKRAIIERSNTRSSLAEVQSEIERIFELARSLQLVVLDADTINHPAQLIKTSLAPIIVHVKVSSPKVLQRLIKSRGKSQSKHLNVQLVAADKLAQCPPEMFDVILDENQLEDACEHLGEYLEAYWRATHTTSSTPMTPLLGRNLGSTALSPYPTAISGLQSQRMRHSNHSTENSPIERRSLMTSDENYHNERARKSRNRLSSSSQHSRDHYPLVEEDYPDSYQDTYKPHRNRGSPGGYSHDSRHRL

SEQ ID NO: 46 - DNA, 3636 bp, Human
  CDS (35)...(3346): standard name = Alpha-2a
  5'UTR (1)...(34)
  3'UTR (3347)...(3636)
gcgggggagggggcattgatcttcgatcgcgaagatggctgctggctgcctgctggccttgactctgacacttttccaatctttgctcatcggcccctcgtcggaggagccgttcccttcggccgtcactatcaaatcatgggtggataagatgcaagaagaccttgtcacactggcaaaaacagcaagtggagtcaatcagcttgttgatatttatgagaaatatcaagatttgtatactgtggaaccaaataatgcacgccagctggtagaaattgcagccagggatattgagaaacttctgagcaacagatctaaagccctggtgagcctggcattggaagcggagaaagttcaagcagctcaccagtggagagaagattttgcaagcaatgaagttgtctactacaatgcaaaggatgatctcgatcctgagaaaaatgacagtgagccaggcagccagaggataaaacctgttttcattgaagatgctaattttggacgacaaatatcttatcagcacgcagcagtccatattcctactgacatctatgagggctcaacaattgtgttaaatgaactcaactggacaagtgccttagatgaagttttcaaaaagaatcgcgaggaagacccttcattattgtggcaggtttttggcagtgccactggcctagctcgatattatccagcttcaccatgggttgataatagtagaactccaaataagattgacctttatgatgtacgcagaagaccatggtacatccaaggagctgcatctcctaaagacatgcttattctggtggatgtgagtggaagtgttagtggattgacacttaaactgatccgaacatctgtctccgaaatgttagaaaccctctcagatgatgatttcgtgaatgtagcttcatttaacagcaatgctcaggatgtaagctgttttcagcaccttgtccaagcaaatgtaagaaataaaaaagtgttgaaagacgcggtgaataatatcacagccaaaggaattacagattataagaagggctttagttttgcttttgaacagctgcttaattataatgtttccagagcaaactgcaataagattattatgctattcacggatggaggagaagagagagcccaggagatatttaacaaatacaataaagataaaaaagtacgtgtattcaggttttcagttggtcaacacaattatgagagaggacctattcagtggatggcctgtgaaaacaaaggttattattatgaaattccttccattggtgcaataagaatcaatactcaggaatatttggatgttttgggaagaccaatggttttagcaggagacaaagctaagcaagtccaatggacaaatgtgtacctggatgcattggaactgggacttgtcattactggaactcttccggtcttcaacataaccggccaatttgaaaataagacaaacttaaagaaccagctgattcttggtgtgatgggagtagatgtgtctttggaagatattaaaagactgacaccacgttttacactgtgccccaatgggtattactttgcaatcgatcctaatggttatgttttattacatccaaatcttcagccaaagcctattggtgtaggtataccaacaattaatttaagaaaaaggagacccaatatccagaaccccaaatctcaggagccagtaacattggatttccttgatgcagagttagagaatgatattaaagtggagattcgaaataagatgattgatggggaaagtggagaaaaaacattcagaactctggttaaatctcaagatgagagatatattgacaaaggaaacaggacatacacatggacacctgtcaatggcacagattacagtttggccttggtattaccaacctacagtttttactatataaaagccaaactagaagagacaataactcaggccagatattcggaaaccctgaagccagataattttgaagaatctggctatacattcatagcaccaagagattactgcaatgacctgaaaatatcggataataacactgaatttcttttaaatttcaacgagtttattgatagaaaaactccaaacaacccatcatgtaacgcggatttgattaatagagtcttgcttgatgcaggctttacaaatgaacttgtccaaaattactggagtaagcagaaaaatatcaagggagtgaaagcacgatttgttgtgactgatggtgggattaccagagtttatcccaaagaggctggagaaaattggcaagaaaacccagagacatatgaggacagcttctataaaaggagcctagataatgataactatgttttcactgctccctactttaacaaaagtggacctggtgcctatgaatcgggcattatggtaagcaaagctgtagaaatatatattcaagggaaacttcttaaacctgcagttgttggaattaaaattgatgtaaattcctggatagagaatttcaccaaaacctcaatcagagatccgtgtgctggtccagtttgtgactgcaaaagaaacagtgacgtaatggattgtgtgattctggatgatggtgggtttcttctgatggcaaatcatgatgattatactaatcagattggaagattttttggagagattgatcccagcttgatgagacacctggttaatatatcagtttatgcttttaacaaatcttatgattatcagtcagtatgtgagcccggtgctgcaccaaaacaaggagcaggacatcgctcagcatatgtgccatcagtagcagacatattacaaattggctggtgggccactgctgctgcctggtctattctacagcagtttctcttgagtttgacctttccacgactccttgaggcagttgagatggaggatgatgacttcacggcctccctgtccaagcagagctgcattactgaacaaacccagtatttcttcgataacgacagtaaatcattcagtggtgtattagactgtggaaactgttccagaatctttcatggagaaaagcttatgaacaccaacttaatattcataatggttgagagcaaagggacatgtccatgtgacacacgactgctcatacaagcggagcagacttctgacggtccaaatccttgtgacatggttaagcaacctagataccgaaaagggcctgatgtctgctttgataacaatgtcttggaggattatactgactgtggtggtgtttctggattaaatccctccctgtggtatatcattggaatccagtttctactactttggctggtatctggcagcacacaccggctgttatgaccttctaaaaaccaaatctgcatagttaaactccagaccctgccaaaacatgagccctgccctcaattacagtaacgtagggtcagctataaaatcagacaaacattagctgggcctgttccatggcataacactaaggcgcagactcctaaggcacccactggctgcatgtcagggtgtcagatccttaaacgtgtgtgaatgctgcatcatctatgtgtaacatcaaagcaaaatcctatacgtgtcctctattggaaaatttgggcgtttgttgttgcattgttggt

SEQ ID NO: 47 - protein, 1103 aa, Human
MAAGCLLALTLTLFQSLLIGPSSEEPFPSAVTIKSWVDKMQEDLVTLAKTASGVNQLVDIYEKYQDLYTVEPNNARQLVEIAARDIEKLLSNRSKALVSLALEAEKVQAAHQWREDFASNEVVYYNAKDDLDPEKNDSEPGSQRIKPVFIEDANFGRQISYQHAAVHIPTDIYEGSTIVLNELNWTSALDEVFKKNREEDPSLLWQVFGSATGLARYYPASPWVDNSRTPNKIDLYDVRRRPWYIQGAASPKDMLILVDVSGSVSGLTLKLIRTSVSEMLETLSDDDFVNVASFNSNAQDVSCFQHLVQANVRNKKVLKDAVNNITAKGITDYKKGFSFAFEQLLNYNVSRANCNKIIMLFTDGGEERAQEIFNKYNKDKKVRVFRFSVGQHNYERGPIQWMACENKGYYYEIPSIGAIRINTQEYLDVLGRPMVLAGDKAKQVQWTNVYLDALELGLVITGTLPVFNITGQFENKTNLKNQLILGVMGVDVSLEDIKRLTPRFTLCPNGYYFAIDPNGYVLLHPNLQPKPIGVGIPTINLRKRRPNIQNPKSQEPVTLDFLDAELENDIKVEIRNKMIDGESGEKTFRTLVKSQDERYIDKGNRTYTWTPVNGTDYSLALVLPTYSFYYIKAKLEETITQARYSETLKPDNFEESGYTFIAPRDYCNDLKISDNNTEFLLNFNEFIDRKTPNNPSCNADLINRVLLDAGFTNELVQNYWSKQKNIKGVKARFVVTDGGITRVYPKEAGENWQENPETYEDSFYKRSLDNDNYVFTAPYFNKSGPGAYESGIMVSKAVEIYIQGKLLKPAVVGIKIDVNSWIENFTKTSIRDPCAGPVCDCKRNSDVMDCVILDDGGFLLMANHDDYTNQIGRFFGEIDPSLMRHLVNISVYAFNKSYDYQSVCEPGAAPKQGAGHRSAYVPSVADILQIGWWATAAAWSILQQFLLSLTFPRLLEAVEMEDDDFTASLSKQSCITEQTQYFFDNDSKSFSGVLDCGNCSRIFHGEKLMNTNLIFIMVESKGTCPCDTRLLIQAEQTSDGPNPCDMVKQPRYRKGPDVCFDNNVLEDYTDCGGVSGLNPSLWYIIGIQFLLLWLVSGSTHRLL

SEQ ID NO: 48 - DNA, 3585 bp, Human
  CDS (35)...(3295): standard name = Alpha-2c
  5'UTR (1)...(34)
  3'UTR (3296)...(3585)
gcgggggagggggcattgatcttcgatcgcgaagatggctgctggctgcctgctggccttgactctgacacttttccaatctttgctcatcggcccctcgtcggaggagccgttcccttcggccgtcactatcaaatcatgggtggataagatgcaagaagaccttgtcacactggcaaaaacagcaagtggagtcaatcagcttgttgatatttatgagaaatatcaagatttgtatactgtggaaccaaataatgcacgccagctggtagaaattgcagccagggatattgagaaacttctgagcaacagatctaaagccctggtgagcctggcattggaagcggagaaagttcaagcagctcaccagtggagagaagattttgcaagcaatgaagttgtctactacaatgcaaaggatgatctcgatcctgagaaaaatgacagtgagccaggcagccagaggataaaacctgttttcattgaagatgctaattttggacgacaaatatcttatcagcacgcagcagtccatattcctactgacatctatgagggctcaacaattgtgttaaatgaactcaactggacaagtgccttagatgaagttttcaaaaagaatcgcgaggaagacccttcattattgtggcaggtttttggcagtgccactggcctagctcgatattatccagcttcaccatgggttgataatagtagaactccaaataagattgacctttatgatgtacgcagaagaccatggtacatccaaggagctgcatctcctaaagacatgcttattctggtggatgtgagtggaagtgttagtggattgacacttaaactgatccgaacatctgtctccgaaatgttagaaaccctctcagatgatgatttcgtgaatgtagcttcatttaacagcaatgctcaggatgtaagctgttttcagcaccttgtccaagcaaatgtaagaaataaaaaagtgttgaaagacgcggtgaataatatcacagccaaaggaattacagattataagaagggctttagttttgcttttgaacagctgcttaattataatgtttccagagcaaactgcaataagattattatgctattcacggatggaggagaagagagagcccaggagatatttaacaaatacaataaagataaaaaagtacgtgtattcaggttttcagttggtcaacacaattatgagagaggacctattcagtggatggcctgtgaaaacaaaggttattattatgaaattccttccattggtgcaataagaatcaatactcaggaatatttggatgttttgggaagaccaatggttttagcaggagacaaagctaagcaagtccaatggacaaatgtgtacctggatgcattggaactgggacttgtcattactggaactcttccggtcttcaacataaccggccaatttgaaaataagacaaacttaaagaaccagctgattcttggtgtgatgggagtagatgtgtctttggaagatattaaaagactgacaccacgttttacactgtgccccaatgggtattactttgcaatcgatcctaatggttatgttttattacatccaaatcttcagccaaaggagccagtaacattggatttccttgatgcagagttagagaatgatattaaagtggagattcgaaataagatgattgatggggaaagtggagaaaaaacattcagaactctggttaaatctcaagatgagagatatattgacaaaggaaacaggacatacacatggacacctgtcaatggcacagattacagtttggccttggtattaccaacctacagtttttactatataaaagccaaactagaagagacaataactcaggccagatcaaaaaagggcaaaatgaaggattcggaaaccctgaagccagataattttgaagaatctggctatacattcatagcaccaagagattactgcaatgacctgaaaatatcggataataacactgaatttcttttaaatttcaacgagtttattgatagaaaaactccaaacaacccatcatgtaacgcggatttgattaatagagtcttgcttgatgcaggctttacaaatgaacttgtccaaaattactggagtaagcagaaaaatatcaagggagtgaaagcacgatttgttgtgactgatggtgggattaccagagtttatcccaaagaggctggagaaaattggcaagaaaacccagagacatatgaggacagcttctataaaaggagcctagataatgataactatgttttcactgctccctactttaacaaaagtggacctggtgcctatgaatcgggcattatggtaagcaaagctgtagaaatatatattcaagggaaacttcttaaacctgcagttgttggaattaaaattgatgtaaattcctggatagagaatttcaccaaaacctcaatcagagatccgtgtgctggtccagtttgtgactgcaaaagaaacagtgacgtaatggattgtgtgattctggatgatggtgggtttcttctgatggcaaatcatgatgattatactaatcagattggaagattttttggagagattgatcccagcttgatgagacacctggttaatatatcagtttatgcttttaacaaatcttatgattatcagtcagtatgtgagcccggtgctgcaccaaaacaaggagcaggacatcgctcagcatatgtgccatcagtagcagacatattacaaattggctggtgggccactgctgctgcctggtctattctacagcagtttctcttgagtttgacctttccacgactccttgaggcagttgagatggaggatgatgacttcacggcctccctgtccaagcagagctgcattactgaacaaacccagtatttcttcgataacgacagtaaatcattcagtggtgtattagactgtggaaactgttccagaatctttcatggagaaaagcttatgaacaccaacttaatattcataatggttgagagcaaagggacatgtccatgtgacacacgactgctcatacaagcggagcagacttctgacggtccaaatccttgtgacatggttaagcaacctagataccgaaaagggcctgatgtctgctttgataacaatgtcttggaggattatactgactgtggtggtgtttctggattaaatccctccctgtggtatatcattggaatccagtttctactactttggctggtatctggcagcacacaccggctgttatgaccttctaaaaaccaaatctgcatagttaaactccagaccctgccaaaacatgagccctgccctcaattacagtaacgtagggtcagctataaaatcagacaaacattagctgggcctgttccatggcataacactaaggcgcagactcctaaggcacccactggctgcatgtcagggtgtcagatccttaaacgtgtgtgaatgctgcatcatctatgtgtaacatcaaagcaaaatcctatacgtgtcctctattggaaaatttgggcgtttgttgttgcattgttggt

SEQ ID NO: 49 - protein, 1086 aa, Human
MAAGCLLALTLTLFQSLLIGPSSEEPFPSAVTIKSWVDKMQEDLVTLAKTASGVNQLVDIYEKYQDLYTVEPNNARQLVEIAARDIEKLLSNRSKALVSLALEAEKVQAAHQWREDFASNEVVYYNAKDDLDPEKNDSEPGSQRIKPVFIEDANFGRQISYQHAAVHIPTDIYEGSTIVLNELNWTSALDEVFKKNREEDPSLLWQVFGSATGLARYYPASPWVDNSRTPNKIDLYDVRRRPWYIQGAASPKDMLILVDVSGSVSGLTLKLIRTSVSEMLETLSDDDFVNVASFNSNAQDVSCFQHLVQANVRNKKVLKDAVNNITAKGITDYKKGFSFAFEQLLNYNVSRANCNKIIMLFTDGGEERAQEIFNKYNKDKKVRVFRFSVGQHNYERGPIQWMACENKGYYYEIPSIGAIRINTQEYLDVLGRPMVLAGDKAKQVQWTNVYLDALELGLVITGTLPVFNITGQFENKTNLKNQLILGVMGVDVSLEDIKRLTPRFTLCPNGYYFAIDPNGYVLLHPNLQPKEPVTLDFLDAELENDIKVEIRNKMIDGESGEKTFRTLVKSQDERYIDKGNRTYTWTPVNGTDYSLALVLPTYSFYYIKAKLEETITQARSKKGKMKDSETLKPDNFEESGYTFIAPRDYCNDLKISDNNTEFLLNFNEFIDRKTPNNPSCNADLINRVLLDAGFTNELVQNYWSKQKNIKGVKARFVVTDGGITRVYPKEAGENWQENPETYEDSFYKRSLDNDNYVFTAPYFNKSGPGAYESGIMVSKAVEIYIQGKLLKPAVVGIKIDVNSWIENFTKTSIRDPCAGPVCDCKRNSDVMDCVILDDGGFLLMANHDDYTNQIGRFFGEIDPSLMRHLVNISVYAFNKSYDYQSVCEPGAAPKQGAGHRSAYVPSVADILQIGWWATAAAWSILQQFLLSLTFPRLLEAVEMEDDDFTASLSKQSCITEQTQYFFDNDSKSFSGVLDCGNCSRIFHGEKLMNTNLIFIMVESKGTCPCDTRLLIQAEQTSDGPNPCDMVKQPRYRKGPDVCFDNNVLEDYTDCGGVSGLNPSLWYIIGIQFLLLWLVSGSTHRLL

SEQ ID NO: 50 - DNA, 3564 bp, Human
  CDS (35)...(3374): standard name = Alpha-2d
  5'UTR (1)...(34)
  3'UTR (3375)...(3565)
gcgggggagggggcattgatcttcgatcgcgaagatggctgctggctgcctgctggccttgactctgacacttttccaatctttgctcatcggcccctcgtcggaggagccgttcccttcggccgtcactatcaaatcatgggtggataagatgcaagaagaccttgtcacactggcaaaaacagcaagtggagtcaatcagcttgttgatatttatgagaaatatcaagatttgtatactgtggaaccaaataatgcacgccagctggtagaaattgcagccagggatattgagaaacttctgagcaacagatctaaagccctggtgagcctggcattggaagcggagaaagttcaagcagctcaccagtggagagaagattttgcaagcaatgaagttgtctactacaatgcaaaggatgatctcgatcctgagaaaaatgacagtgagccaggcagccagaggataaaacctgttttcattgaagatgctaattttggacgacaaatatcttatcagcacgcagcagtccatattcctactgacatctatgagggctcaacaattgtgttaaatgaactcaactggacaagtgccttagatgaagttttcaaaaagaatcgcgaggaagacccttcattattgtggcaggtttttggcagtgccactggcctagctcgatattatccagcttcaccatgggttgataatagtagaactccaaataagattgacctttatgatgtacgcagaagaccatggtacatccaaggagctgcatctcctaaagacatgcttattctggtggatgtgagtggaagtgttagtggattgacacttaaactgatccgaacatctgtctccgaaatgttagaaaccctctcagatgatgatttcgtgaatgtagcttcatttaacagcaatgctcaggatgtaagctgttttcagcaccttgtccaagcaaatgtaagaaataaaaaagtgttgaaagacgcggtgaataatatcacagccaaaggaattacagattataagaagggctttagttttgcttttgaacagctgcttaattataatgtttccagagcaaactgcaataagattattatgctattcacggatggaggagaagagagagcccaggagatatttaacaaatacaataaagataaaaaagtacgtgtattcaggttttcagttggtcaacacaattatgagagaggacctattcagtggatggcctgtgaaaacaaaggttattattatgaaattccttccattggtgcaataagaatcaatactcaggaatatttggatgttttgggaagaccaatggttttagcaggagacaaagctaagcaagtccaatggacaaatgtgtacctggatgcattggaactgggacttgtcattactggaactcttccggtcttcaacataaccggccaatttgaaaataagacaaacttaaagaaccagctgattcttggtgtgatgggagtagatgtgtctttggaagatattaaaagactgacaccacgttttacactgtgccccaatgggtattactttgcaatcgatcctaatggttatgttttattacatccaaatcttcagccaaaggagccagtaacattggatttccttgatgcagagttagagaatgatattaaagtggagattcgaaataagatgattgatggggaaagtggagaaaaaacattcagaactctggttaaatctcaagatgagagatatattgacaaaggaaacaggacatacacatggacacctgtcaatggcacagattacagtttggccttggtattaccaacctacagtttttactatataaaagccaaactagaagagacaataactcaggccagatattcggaaaccctgaagccagataattttgaagaatctggctatacattcatagcaccaagagattactgcaatgacctgaaaatatcggataataacactgaatttcttttaaatttcaacgagtttattgatagaaaaactccaaacaacccatcatgtaacgcggatttgattaatagagtcttgcttgatgcaggctttacaaatgaacttgtccaaaattactggagtaagcagaaaaatatcaagggagtgaaagcacgatttgttgtgactgatggtgggattaccagagtttatcccaaagaggctggagaaaattggcaagaaaacccagagacatatgaggacagcttctataaaaggagcctagataatgataactatgttttcactgctccctactttaacaaaagtggacctggtgcctatgaatcgggcattatggtaagcaaagctgtagaaatatatattcaagggaaacttcttaaacctgcagttgttggaattaaaattgatgtaaattcctggatagagaatttcaccaaaacctcaatcagagatccgtgtgctggtccagtttgtgactgcaaaagaaacagtgacgtaatggattgtgtgattctggatgatggtgggtttcttctgatggcaaatcatgatgattatactaatcagattggaagattttttggagagattgatcccagcttgatgagacacctggttaatatatcagtttatgcttttaacaaatcttatgattatcagtcagtatgtgagcccggtgctgcaccaaaacaaggagcaggacatcgctcagcatatgtgccatcagtagcagacatattacaaattggctggtgggccactgctgctgcctggtctattctacagcagtttctcttgagtttgacctttccacgactccttgaggcagttgagatggaggatgatgacttcacggcctccctgtccaagcagagctgcattactgaacaaacccagtatttcttcgataacgacagtaaatcattcagtggtgtattagactgtggaaactgttccagaatctttcatggagaaaagcttatgaacaccaacttaatattcataatggttgagagcaaagggacatgtccatgtgacacacgactgctcatacaagcggagcagacttctgacggtccaaatccttgtgacatggttaagcaacctagataccgaaaagggcctgatgtctgctttgataacaatgtcttggaggattatactgactgtggtggtgtttctggattaaatccctccctgtggtatatcattggaatccagtttctactactttggctggtatctggcagcacacaccggctgttatgaccttctaaaaaccaaatctgcatagttaaactccagaccctgccaaaacatgagccctgccctcaattacagtaacgtagggtcagctataaaatcagacaaacattagctgggcctgttccatggcataacactaaggcgcagactcctaaggcacccactggctgcatgtcagggtgtcagatccttaaacgtgtgtgaatgctgcatcatctatgtgtaacatcaaagcaaaatcctatacgtgtcctctattggaaaatttgggcgtttgttgttgcattgttggt

SEQ ID NO: 51 - protein, 1079 aa, Human
MAAGCLLALTLTLFQSLLIGPSSEEPFPSAVTIKSWVDKMQEDLVTLAKTASGVNQLVDIYEKYQDLYTVEPNNARQLVEIAARDIEKLLSNRSKALVSLALEAEKVQAAHQWREDFASNEVVYYNAKDDLDPEKNDSEPGSQRIKPVFIEDANFGRQISYQHAAVHIPTDIYEGSTIVLNELNWTSALDEVFKKNREEDPSLLWQVFGSATGLARYYPASPWVDNSRTPNKIDLYDVRRRPWYIQGAASPKDMLILVDVSGSVSGLTLKLIRTSVSEMLETLSDDDFVNVASFNSNAQDVSCFQHLVQANVRNKKVLKDAVNNITAKGITDYKKGFSFAFEQLLNYNVSRANCNKIIMLFTDGGEERAQEIFNKYNKDKKVRVFRFSVGQHNYERGPIQWMACENKGYYYEIPSIGAIRINTQEYLDVLGRPMVLAGDKAKQVQWTNVYLDALELGLVITGTLPVFNITGQFENKTNLKNQLILGVMGVDVSLEDIKRLTPRFTLCPNGYYFAIDPNGYVLLHPNLQPKEPVTLDFLDAELENDIKVEIRNKMIDGESGEKTFRTLVKSQDERYIDKGNRTYTWTPVNGTDYSLALVLPTYSFYYIKAKLEETITQARYSETLKPDNFEESGYTFIAPRDYCNDLKISDNNTEFLLNFNEFIDRKTPNNPSCNADLINRVLLDAGFTNELVQNYWSKQKNIKGVKARFVVTDGGITRVYPKEAGENWQENPETYEDSFYKRSLDNDNYVFTAPYFNKSGPGAYESGIMVSKAVEIYIQGKLLKPAVVGIKIDVNSWIENFTKTSIRDPCAGPVCDCKRNSDVMDCVILDDGGFLLMANHDDYTNQIGRFFGEIDPSLMRHLVNISVYAFNKSYDYQSVCEPGAAPKQGAGHRSAYVPSVADILQIGWWATAAAWSILQQFLLSLTFPRLLEAVEMEDDDFTASLSKQSCITEQTQYFFDNDSKSFSGVLDCGNCSRIFHGEKLMNTNLIFIMVESKGTCPCDTRLLIQAEQTSDGPNPCDMVKQPRYRKGPDVCFDNNVLEDYTDCGGVSGLNPSLWYIIGIQFLLLWLVSGSTHRLL

SEQ ID NO: 52 - DNA, 3579 bp, Human
  CDS (35)...(3289): standard name = Alpha-2e
  5'UTR (1)...(34)
  3'UTR (3289)...(3579)
  misc_feature 975: n = A,T,C or G
gcgggggagggggcattgatcttcgatcgcgaagatggctgctggctgcctgctggccttgactctgacacttttccaatctttgctcatcggcccctcgtcggaggagccgttcccttcggccgtcactatcaaatcatgggtggataagatgcaagaagaccttgtcacactggcaaaaacagcaagtggagtcaatcagcttgttgatatttatgagaaatatcaagatttgtatactgtggaaccaaataatgcacgccagctggtagaaattgcagccagggatattgagaaacttctgagcaacagatctaaagccctggtgagcctggcattggaagcggagaaagttcaagcagctcaccagtggagagaagattttgcaagcaatgaagttgtctactacaatgcaaaggatgatctcgatcctgagaaaaatgacagtgagccaggcagccagaggataaaacctgttttcattgaagatgctaattttggacgacaaatatcttatcagcacgcagcagtccatattcctactgacatctatgagggctcaacaattgtgttaaatgaactcaactggacaagtgccttagatgaagttttcaaaaagaatcgcgaggaagacccttcattattgtggcaggtttttggcagtgccactggcctagctcgatattatccagcttcaccatgggttgataatagtagaactccaaataagattgacctttatgatgtacgcagaagaccatggtacatccaaggagctgcatctcctaaagacatgcttattctggtggatgtgagtggaagtgttagtggattgacacttaaactgatccgaacatctgtctccgaaatgttagaaaccctctcagatgatgatttcgtgaatgtagcttcatttaacagcaatgctcaggatgtaagctgttttcagcaccttgtccaagcaaatgtaagaantaaaaaagtgttgaaagacgcggtgaataatatcacagccaaaggaattacagattataagaagggctttagttttgcttttgaacagctgcttaattataatgtttccagagcaaactgcaataagattattatgctattcacggatggaggagaagagagagcccaggagatatttaacaaatacaataaagataaaaaagtacgtgtattcaggttttcagttggtcaacacaattatgagagaggacctattcagtggatggcctgtgaaaacaaaggttattattatgaaattccttccattggtgcaataagaatcaatactcaggaatatttggatgttttgggaagaccaatggttttagcaggagacaaagctaagcaagtccaatggacaaatgtgtacctggatgcattggaactgggacttgtcattactggaactcttccggtcttcaacataaccggccaatttgaaaataagacaaacttaaagaaccagctgattcttggtgtgatgggagtagatgtgtctttggaagatattaaaagactgacaccacgttttacactgtgccccaatgggtattactttgcaatcgatcctaatggttatgttttattacatccaaatcttcagccaaagaaccccaaatctcaggagccagtaacattggatttccttgatgcagagttagagaatgatattaaagtggagattcgaaataagatgattgatggggaaagtggagaaaaaacattcagaactctggttaaatctcaagatgagagatatattgacaaaggaaacaggacatacacatggacacctgtcaatggcacagattacagtttggccttggtattaccaacctacagtttttactatataaaagccaaactagaagagacaataactcaggccagatattcggaaaccctgaagccagataattttgaagaatctggctatacattcatagcaccaagagattactgcaatgacctgaaaatatcggataataacactgaatttcttttaaatttcaacgagtttattgatagaaaaactccaaacaacccatcatgtaacgcggatttgattaatagagtcttgcttgatgcaggctttacaaatgaacttgtccaaaattactggagtaagcagaaaaatatcaagggagtgaaagcacgatttgttgtgactgatggtgggattaccagagtttatcccaaagaggctggagaaaattggcaagaaaacccagagacatatgaggacagcttctataaaaggagcctagataatgataactatgttttcactgctccctactttaacaaaagtggacctggtgcctatgaatcgggcattatggtaagcaaagctgtagaaatatatattcaagggaaacttcttaaacctgcagttgttggaattaaaattgatgtaaattcctggatagagaatttcaccaaaacctcaatcagagatccgtgtgctggtccagtttgtgactgcaaaagaaacagtgacgtaatggattgtgtgattctggatgatggtgggtttcttctgatggcaaatcatgatgattatactaatcagattggaagattttttggagagattgatcccagcttgatgagacacctggttaatatatcagtttatgcttttaacaaatcttatgattatcagtcagtatgtgagcccggtgctgcaccaaaacaaggagcaggacatcgctcagcatatgtgccatcagtagcagacatattacaaattggctggtgggccactgctgctgcctggtctattctacagcagtttctcttgagtttgacctttccacgactccttgaggcagttgagatggaggatgatgacttcacggcctccctgtccaagcagagctgcattactgaacaaacccagtatttcttcgataacgacagtaaatcattcagtggtgtattagactgtggaaactgttccagaatctttcatggagaaaagcttatgaacaccaacttaatattcataatggttgagagcaaagggacatgtccatgtgacacacgactgctcatacaagcggagcagacttctgacggtccaaatccttgtgacatggttaagcaacctagataccgaaaagggcctgatgtctgctttgataacaatgtcttggaggattatactgactgtggtggtgtttctggattaaatccctccctgtggtatatcattggaatccagtttctactactttggctggtatctggcagcacacaccggctgttatgaccttctaaaaaccaaatctgcatagttaaactccagaccctgccaaaacatgagccctgccctcaattacagtaacgtagggtcagctataaaatcagacaaacattagctgggcctgttccatggcataacactaaggcgcagactcctaaggcacccactggctgcatgtcagggtgtcagatccttaaacgtgtgtgaatgctgcatcatctatgtgtaacatcaaagcaaaatcctatacgtgtcctctattggaaaatttgggcgtttgttgttgcattgttggt

SEQ ID NO: 53 - protein, 1084 aa, Human
MAAGCLLALTLTLFQSLLIGPSSEEPFPSAVTIKSWVDKMQEDLVTLAKTASGVNQLVDIYEKYQDLYTVEPNNARQLVEIAARDIEKLLSNRSKALVSLALEAEKVQAAHQWREDFASNEVVYYNAKDDLDPEKNDSEPGSQRIKPVFIEDANFGRQISYQHAAVHIPTDIYEGSTIVLNELNWTSALDEVFKKNREEDPSLLWQVFGSATGLARYYPASPWVDNSRTPNKIDLYDVRRRPWYIQGAASPKDMLILVDVSGSVSGLTLKLIRTSVSEMLETLSDDDFVNVASFNSNAQDVSCFQHLVQANVRNKKVLKDAVNNITAKGITDYKKGFSFAFEQLLNYNVSRANCNKIIMLFTDGGEERAQEIFNKYNKDKKVRVFRFSVGQHNYERGPIQWMACENKGYYYEIPSIGAIRINTQEYLDVLGRPMVLAGDKAKQVQWTNVYLDALELGLVITGTLPVFNITGQFENKTNLKNQLILGVMGVDVSLEDIKRLTPRFTLCPNGYYFAIDPNGYVLLHPNLQPKNPKSQEPVTLDFLDAELENDIKVEIRNKMIDGESGEKTFRTLVKSQDERYIDKGNRTYTWTPVNGTDYSLALVLPTYSFYYIKAKLEETITQARYSETLKPDNFEESGYTFIAPRDYCNDLKISDNNTEFLLNFNEFIDRKTPNNPSCNADLINRVLLDAGFTNELVQNYWSKQKNIKGVKARFVVTDGGITRVYPKEAGENWQENPETYEDSFYKRSLDNDNYVFTAPYFNKSGPGAYESGIMVSKAVEIYIQGKLLKPAVVGIKIDVNSWIENFTKTSIRDPCAGPVCDCKRNSDVMDCVILDDGGFLLMANHDDYTNQIGRFFGEIDPSLMRHLVNISVYAFNKSYDYQSVCEPGAAPKQGAGHRSAYVPSVADILQIGWWATAAAWSILQQFLLSLTFPRLLEAVEMEDDDFTASLSKQSCITEQTQYFFDNDSKSFSGVLDCGNCSRIFHGEKLMNTNLIFIMVESKGTCPCDTRLLIQAEQTSDGPNPCDMVKQPRYRKGPDVCFDNNVLEDYTDCGGVSGLNPSLWYIIGIQFLLLWLVSGSTHRLL

SEQ ID NO: 54 - DNA, 1681 bp, Human
  CDS (1)...(1437): standard name = Beta-1-1
  3'UTR (1435)...(1681)
atggtccagaagaccagcatgtcccggggcccttacccaccctcccaggagatccccatggaggtcttcgaccccagcccgcagggcaaatacagcaagaggaaagggcgattcaaacggtcagatgggagcacgtcctcggataccacatccaacagctttgtccgccagggctcagcggagtcctacaccagccgtccatcagactctgatgtatctctggaggaggaccgggaagccttaaggaaggaagcagagcgccaggcattagcgcagctcgagaaggccaagaccaagccagtggcatttgctgtgcggacaaatgttggctacaatccgtctccaggggatgaggtgcctgtgcagggagtggccatcaccttcgagcccaaagacttcctgcacatcaaggagaaatacaataatgactggagccccgtcaaactggacagccttcgcctgctgcaggaacagaagctgcgccagaaccgcctcggctccagcaaatcaggcgataactccagttccagtctgggagatgtggtgactggcacccgccgccccacaccccctgccagtggtaatgaaatgactaacttagcctttgaactagaccccctagagttagaggaggaagaggctgagcttggtgagcagagtggctctgccaagactagtgttagcagtgtcaccaccccgccaccccatggcaaacgcatccccttctttaagaagacagagcatgtgcccccctatgacgtggtgccttggatcgggcggctggtgaaggagggctgtgaggttggcttcattccctccatgaggcccatcatcctggtgggaccgtcgctcaagggctacgaggttacagacatgatgcagaaagctttatttgacttcttgaagcatcggtttgatggcaggatctccatcactcgtgtgacggcagatatttccctggctaagcgctcagttctcaacaaccccagcaaacacatcatcattgagcgctccaacacacgctccagcctggctgaggtgcagagtgaaatcgagcgaatcttcgagctggcccggacccttcagttggtcgctctggatgctgacaccatcaatcacccagcccagctgtccaagacctcgctggcccccatcattgtttacatcaagatcacctctcccaaggtacttcaaaggctcatcaagtcccgaggaaagtctcagtccaaacacctcaatgtccaaatagcggcctcggaaaagctggcacagtgcccccctgaaatgtttgacatcatcctggatgagaaccaattggaggatgcctgcgagcatctggcggagtacttggaagcctattggaaggccacacacccgcccagcagcacgccacccaatccgctgctgaaccgcaccatggctaccgcagccctggctgccagccctgcccctgtctccaacctccaggtacaggtgctcacctcgctcaggagaaacctcggcttctggggcgggctggagtcctcacagcggggcagtgtggtgccccaggagcaggaacatgccatgtagtgggcgccctgcccgtcttccctcctgctctggggtcggaactggagtgcagggaacatggaggaggaagggaagagctttattttgtaaaaaaataagatgagcggca

SEQ ID NO: 55 - protein, 479 aa, Human
MVQKTSMSRGPYPPSQEIPMEVFDPSPQGKYSKRKGRFKRSDGSTSSDTTSNSFVRQGSAESYTSRPSDSDVSLEEDREALRKEAERQALAQLEKAKTKPVAFAVRTNVGYNPSPGDEVPVQGVAITFEPKDFLHIKEKYNNDWSPVKLDSLRLLQEQKLRQNRLGSSKSGDNSSSSLGDVVTGTRRPTPPASGNEMTNLAFELDPLELEEEEAELGEQSGSAKTSVSSVTTPPPHGKRIPFFKKTEHVPPYDVVPWIGRLVKEGCEVGFIPSMRPIILVGPSLKGYEVTDMMQKALFDFLKHRFDGRISITRVTADISLAKRSVLNNPSKHIIIERSNTRSSLAEVQSEIERIFELARTLQLVALDADTINHPAQLSKTSLAPIIVYIKITSPKVLQRLIKSRGKSQSKHLNVQIAASEKLAQCPPEMFDIILDENQLEDACEHLAEYLEAYWKATHPPSSTPPNPLLNRTMATAALA

SEQ ID NO: 56 - DNA, 1526 bp, Human
  CDS (1)...(651): standard name = Beta-1-4
atggtccagaagaccagcatgtcccggggcccttacccaccctcccaggagatccccatggaggtcttcgaccccagcccgcagggcaaatacagcaagaggaaagggcgattcaaacggtcagatgggagcacgtcctcggataccacatccaacagctttgtccgccagggctcagcggagtcctacaccagccgtccatcagactctgatgtatctctggaggaggaccgggaagccttaaggaaggaagcagagcgccaggcattagcgcagctcgagaaggccaagaccaagccagtggcatttgctgtgcggacaaatgttggctacaatccgtctccaggggatgaggtgcctgtgcagggagtggccatcaccttcgagcccaaagacttcctgcacatcaaggagaaatacaataatgactggtggatcgggcggctggtgaaggagggctgtgaggttggcttcattcccagccccgtcaaactggacagccttcgcctgctgcaggaacagaagctgcgccagaaccgcctcggctccagcaaatcaggcgataactccagttccagtctgggagatgtggtgactggcacccgccgccccacaccccctgccagtgacagagcatgtgcccccctatgacgtggtgccttccatgaggcccatcatcctggtgggaccgtcgctcaagggctacgaggttacagacatgatgcagaaagctttatttgacttcttgaagcatcggtttgatggcaggatctccatcactcgtgtgacggcagatatttccctggctaagcgctcagttctcaacaaccccagcaaacacatcatcattgagcgctccaacacacgctccagcctggctgaggtgcagagtgaaatcgagcgaatcttcgagctggcccggacccttcagttggtcgctctggatgctgacaccatcaatcacccagcccagctgtccaagacctcgctggcccccatcattgtttacatcaagatcacctctcccaaggtacttcaaaggctcatcaagtgctgaggaaagtctcagtccaaacacctcaatgtccaaatagcggcctcggaaaagctggcacagtgcccccctgaaatgtttgacatcatcctggatgagaaccaattggaggatgcctgcgagcatctggcggagtacttggaagcctattggaaggccacacacccgcccagcagcacgccacccaatccgctgctgaaccgcaccatggctaccgcagccctggctgccagccctgcccctgtctccaacctccaggtacaggtgctcacctcgctcaggagaaacctcggcttctggggcgggctggagtcctcacagcggggcagtgtggtgccccaggagcaggaacatgccatgtagtgggcgccctgcccgtcttccctcctgctctggggtcggaactggagtgcagggaacatggaggaggaagggaagagctttattttgtaaaaaaataagatgagcggca

SEQ ID NO: 57 - protein, 216 aa, Human
MVQKTSMSRGPYPPSQEIPMEVFDPSPQGKYSKRKGRFKRSDGSTSSDTTSNSFVRQGSAESYTSRPSDSDVSLEEDREALRKEAERQALAQLEKAKTKPVAFAVRTNVGYNPSPGDEVPVQGVAITFEPKDFLHIKEKYNNDWWIGRLVKEGCEVGFIPSPVKLDSLRLLQEQKLRQNRLGSSKSGDNSSSSLGDVVTGTRRPTPPASDRACAPL

SEQ ID NO: 58 - DNA, 1393 bp, Human
  CDS (1)...(660): standard name = Beta-1-5
atggtccagaagaccagcatgtcccggggcccttacccaccctcccaggagatccccatggaggtcttcgaccccagcccgcagggcaaatacagcaagaggaaagggcgattcaaacggtcagatgggagcacgtcctcggataccacatccaacagctttgtccgccagggctcagcggagtcctacaccagccgtccatcagactctgatgtatctctggaggaggaccgggaagccttaaggaaggaagcagagcgccaggcattagcgcagctcgagaaggccaagaccaagccagtggcatttgctgtgcggacaaatgttggctacaatccgtctccaggggatgaggtgcctgtgcagggagtggccatcaccttcgagcccaaagacttcctgcacatcaaggagaaatacaataatgactggtggatcgggcggctggtgaaggagggctgtgaggttggcttcattcccagccccgtcaaactggacagccttcgcctgctgcaggaacagaagctgcgccagaaccgcctcggctccagcaaatcaggcgataactccagttccagtctgggagatgtggtgactggcacccgccgccccacaccccctgccagtggttacagacatgatgcagaaagctttatttgacttcttgaagcatcggtttgatggcaggatctccatcactcgtgtgacggcagatatttccctggctaagcgctcagttctcaacaaccccagcaaacacatcatcattgagcgctccaacacacgctccagcctggctgaggtgcagagtgaaatcgagcgaatcttcgagctggcccggacccttcagttggtcgctctggatgctgacaccatcaatcacccagcccagctgtccaagacctcgctggcccccatcattgtttacatcaagatcacctctcccaaggtacttcaaaggctcatcaagtcctgaggaaagtctcagtccaaacacctcaatgtccaaatagcggcctcggaaaagctggcacagtgcccccctgaaatgtttgacatcatcctggatgagaaccaattggaggatgcctgcgagcatctggcggagtacttggaagcctattggaaggccacacacccgcccagcagcacgccacccaatccgctgctgaaccgcaccatggctaccgcagccctggctgccagccctgcccctgtctccaacctccaggtacaggtgctcacctcgctcaggagaaacctcggcttctggggcgggctggagtcctcacagcggggcagtgtggtgccccaggagcaggaacatgccatgtagtgggcgccctgcccgtcttccctcctgctctggggtcggaactggagtgcagggaac

SEQ ID NO: 59 - protein, 219 aa, Human
MVQKTSMSRGPYPPSQEIPMEVFDPSPQGKYSKRKGRFKRSDGSTSSDTTSNSFVRQGSAESYTSRPSDSDVSLEEDREALRKEAERQALAQLEKAKTKPVAFAVRTNVGYNPSPGDEVPVQGVAITFEPKDFLHIKEKYNNDWWIGRLVKEGCEVGFIPSPVKLDSLRLLQEQKLRQNRLGSSKSGDNSSSSLGDVVTGTRRPTPPASGYRHDAESFI

SEQ ID NO: 60 - DNA, 6725 bp, Human
  CDS (226)...(6642): standard name = Alpha-1C-2
ctcgaggaggcagtagtggaaaggagcagtttttggggtttgatgccataatgggaatcaggtaatcgtcggcggggaagaagaaacgctgcagaccacggcttcctcgaatcttgcgcgaaagccgccggcctcggaggagggattaatccagacccgccggggggtgttttcacatttcttcctcttcgtggctgctcctcctattaaaaccatttttggtccatggtcaatgagaatacgaggatgtacattccagaggaaaaccaccaaggttccaactatgggagcccacgccccgcccatgccaacatgaatgccaatgcggcagcggggctggcccctgagcacatccccaccccgggggctgccctgtcgtggcaggcggccatcgacgcagcccggcaggctaagctgatgggcagcgctggcaatgcgaccatctccacagtcagctccacgcagcggaagcggcagcaatatgggaaacccaagaagcagggcagcaccacggccacacgcccgccccgagccctgctctgcctgaccctgaagaaccccatccggagggcctgcatcagcattgtcgaatggaaaccatttgaaataattattttactgactatttttgccaattgtgtggccttagcgatctatattccctttccagaagatgattccaacgccaccaattccaacctggaacgagtggaatatctctttctcataatttttacggtggaagcgtttttaaaagtaatcgcctatggactcctctttcaccccaatgcctacctccgcaacggctggaacctactagattttataattgtggttgtggggctttttagtgcaattttagaacaagcaaccaaagcagatggggcaaacgctctcggagggaaaggggccggatttgatgtgaaggcgctgagggccttccgcgtgctgcgccccctgcggctggtgtccggagtcccaagtctccaggtggtcctgaattccatcatcaaggccatggtccccctgctgcacatcgccctgcttgtgctgtttgtcatcatcatctacgccatcatcggcttggagctcttcatggggaagatgcacaagacctgctacaaccaggagggcatagcagatgttccagcagaagatgacccttccccttgtgcgctggaaacgggccacgggcggcagtgccagaacggcacggtgtgcaagcccggctgggatggtcccaagcacggcatcaccaactttgacaactttgccttcgccatgctcacggtgttccagtgcatcaccatggagggctggacggacgtgctgtactgggtcaatgatgccgtaggaagggactggccctggatctattttgttacactaatcatcatagggtcattttttgtacttaacttggttctcggtgtgcttagcggagagttttccaaagagagggagaaggccaaggcccggggagatttccagaagctgcgggagaagcagcagctagaagaggatctcaaaggctacctggattggatcactcaggccgaagacatcgatcctgagaatgaggacgaaggcatggatgaggagaagccccgaaacatgagcatgcccaccagtgagaccgagtccgtcaacaccgaaaacgtggctggaggtgacatcgagggagaaaactgcggggccaggctggcccaccggatctccaagtcaaagttcagccgctactggcgccggtggaatcggttctgcagaaggaagtgccgcgccgcagtcaagtctaatgtcttctactggctggtgattttcctggtgttcctcaacacgctcaccattgcctctgagcactacaaccagcccaactggctcacagaagtccaagacacggcaaacaaggccctgctggccctgttcacggcagagatgctcctgaagatgtacagcctgggcctgcaggcctacttcgtgtccctcttcaaccgctttgactgcttcgtcgtgtgtggcggcatcctggagaccatcctggtggagaccaagatcatgtccccactgggcatctccgtgctcagatgcgtccggctgctgaggattttcaagatcacgaggtactggaactccttgagcaacctggtggcatccttgctgaactctgtgcgctccatcgcctccctgctccttctcctcttcctcttcatcatcatcttctccctcctggggatgcagctctttggaggaaagttcaactttgatgagatgcagacccggaggagcacattcgataacttcccccagtccctcctcactgtgtttcagatcctgaccggggaggactggaattcggtgatgtatgatgggatcatggcttatggcggcccctcttttccagggatgttagtctgtatttacttcatcatcctcttcatctgtggaaactatatcctactgaatgtgttcttggccattgctgtggacaacctggctgatgctgagagcctcacatctgcccaaaaggaggaggaagaggagaaggagagaaagaagctggccaggactgccagcccagagaagaaacaagagttggtggagaagccggcagtgggggaatccaaggaggagaagattgagctgaaatccatcacggctgacggagagtctccacccgccaccaagatcaacatggatgacctccagcccaatgaaaatgaggataagagcccctaccccaacccagaaactacaggagaagaggatgaggaggagccagagatgcctgtcggccctcgcccacgaccactctctgagcttcaccttaaggaaaaggcagtgcccatgccagaagccagcgcgtttttcatcttcagctctaacaacaggtttcgcctccagtgccaccgcattgtcaatgacacgatcttcaccaacctgatcctcttcttcattctgctcagcagcatttccctggctgctgaggacccggtccagcacacctccttcaggaaccatattctgttttattttgatattgtttttaccaccattttcaccattgaaattgctctgaagatgactgcttatggggctttcttgcacaagggttctttctgccggaactacttcaacatcctggacctgctggtggtcagcgtgtccctcatctcctttggcatccagtccagtgcaatcaatgtcgtgaagatcttgcgagtcctgcgagtactcaggcccctgagggccatcaacagggccaaggggctaaagcatgtggttcagtgtgtgtttgtcgccatccggaccatcgggaacatcgtgattgtcaccaccctgctgcagttcatgtttgcctgcatcggggtccagctcttcaagggaaagctgtacacctgttcagacagttccaagcagacagaggcggaatgcaagggcaactacatcacgtacaaagacggggaggttgaccaccccatcatccaaccccgcagctgggagaacagcaagtttgactttgacaatgttctggcagccatgatggccctcttcaccgtctccaccttcgaagggtggccagagctgctgtaccgctccatcgactcccacacggaagacaagggccccatctacaactaccgtgtggagatctccatcttcttcatcatctacatcatcatcatcgccttcttcatgatgaacatcttcgtgggcttcgtcatcgtcacctttcaggagcagggggagcaggagtacaagaactgtgagctggacaagaaccagcgacagtgcgtggaatacgccctcaaggcccggcccctgcggaggtacatccccaagaaccagcaccagtacaaagtgtggtacgtggtcaactccacctacttcgagtacctgatgttcgtcctcatcctgctcaacaccatctgcctggccatgcagcactacggccagagctgcctgttcaaaatcgccatgaacatcctcaacatgctcttcactggcctctttaccgtggagatgatcctgaagctcattgccttcaaacccaagcactatttctgtgatgcatggaatacatttgacgccttgattgttgtgggtagcattgttgatatagcaatcaccgaggtaaacccagctgaacatacccaatgctctccctctatgaacgcagaggaaaactcccgcatctccatcaccttcttccgcctgttccgggtcatgcgtctggtgaagctgctgagccgtggggagggcatccggacgctgctgtggaccttcatcaagtccttccaggccctgccctatgtggccctcctgatcgtgatgctgttcttcatctacgcggtgatcgggatgcaggtgtttgggaaaattgccctgaatgataccacagagatcaaccggaacaacaactttcagaccttcccccaggccgtgctgctcctcttcaggtgtgccaccggggaggcctggcaggacatcatgctggcctgcatgccaggcaagaagtgtgccccagagtccgagcccagcaacagcacggagggtgaaacaccctgtggtagcagctttgctgtcttctacttcatcagcttctacatgctctgtgccttcctgatcatcaacctctttgtagctgtcatcatggacaactttgactacctgacaagggactggtccatccttggtccccaccacctggatgagtttaaaagaatctgggcagagtatgaccctgaagccaagggtcgtatcaaacacctggatgtggtgaccctcctccggcggattcagccgccactaggttttgggaagctgtgccctcaccgcgtggcttgcaaacgcctggtctccatgaacatgcctctgaacagcgacgggacagtcatgttcaatgccaccctgtttgccctggtcaggacggccctgaggatcaaaacagaagggaacctagaacaagccaatgaggagctgcgggcgatcatcaagaagatctggaagcggaccagcatgaagctgctggaccaggtggtgccccctgcaggtgatgatgaggtcaccgttggcaagttctacgccacgttcctgatccaggagtacttccggaagttcaagaagcgcaaagagcagggccttgtgggcaagccctcccagaggaacgcgctgtctctgcaggctggcttgcgcacactgcatgacatcgggcctgagatccgacgggccatctctggagatctcaccgctgaggaggagctggacaaggccatgaaggaggctgtgtccgctgcttctgaagatgacatcttcaggagggccggtggcctgttcggcaaccacgtcagctactaccaaagcgacggccggagcgccttcccccagaccttcaccactcagcgcccgctgcacatcaacaaggcgggcagcagccagggcgacactgagtcgccatcccacgagaagctggtggactccaccttcaccccgagcagctactcgtccaccggctccaacgccaacatcaacaacgccaacaacaccgccctgggtcgcctccctcgccccgccggctaccccagcacggtcagcactgtggagggccacgggccccccttgtcccctgccatccgggtgcaggaggtggcgtggaagctcagctccaacaggtgccactcccgggagagccaggcagccatggcgggtcaggaggagacgtctcaggatgagacctatgaagtgaagatgaaccatgacacggaggcctgcagtgagcccagcctgctctccacagagatgctctcctaccaggatgacgaaaatcggcaactgacgctcccagaggaggacaagagggacatccggcaatctccgaagaggggtttcctccgctctgcctcactaggtcgaagggcctccttccacctggaatgtctgaagcgacagaaggaccgagggggagacatctctcagaagacagtcctgcccttgcatctggttcatcatcaggcattggcagtggcaggcctgagccccctcctccagagaagccattcccctgcctcattccctaggccttttgccaccccaccagccacacctggcagccgaggctggcccccacagcccgtccccaccctgcggcttgagggggtcgagtccagtgagaaactcaacagcagcttcccatccatccactgcggctcctgggctgagaccacccccggtggcgggggcagcagcgccgcccggagagtccggcccgtctccctcatggtgcccagccaggctggggccccagggaggcagttccacggcagtgccagcagcctggtggaagcggtcttgatttcagaaggactggggcagtttgctcaagatcccaagttcatcgaggtcaccacccaggagctggccgacgcctgcgacatgaccatagaggagatggagagcgcggccgacaacatcctcagcgggggcgccccacagagccccaatggcgccctcttaccctttgtgaactgcagggacgcggggcaggaccgagccgggggcgaagaggacgcgggctgtgtgcgcgcgcggggtcgaccgagtgaggaggagctccaggacagcagggtctacgtcagcagcctgtagtgggcgctgccagatgcgggcttttttttatttgtttcaatgttcctaatgggttcgtttcagaagtgcctcactgttctcgt

SEQ ID NO: 61 - protein, 2138 aa, Human
MVNENTRMYIPEENHQGSNYGSPRPAHANMNANAAAGLAPEHIPTPGAALSWQAAIDAARQAKLMGSAGNATISTVSSTQRKRQQYGKPKKQGSTTATRPPRALLCLTLKNPIRRACISIVEWKPFEIIILLTIFANCVALAIYIPFPEDDSNATNSNLERVEYLFLIIFTVEAFLKVIAYGLLFHPNAYLRNGWNLLDFIIVVVGLFSAILEQATKADGANALGGKGAGFDVKALRAFRVLRPLRLVSGVPSLQVVLNSIIKAMVPLLHIALLVLFVIIIYAIIGLELFMGKMHKTCYNQEGIADVPAEDDPSPCALETGHGRQCQNGTVCKPGWDGPKHGITNFDNFAFAMLTVFQCITMEGWTDVLYWVNDAVGRDWPWIYFVTLIIIGSFFVLNLVLGVLSGEFSKEREKAKARGDFQKLREKQQLEEDLKGYLDWITQAEDIDPENEDEGMDEEKPRNMSMPTSETESVNTENVAGGDIEGENCGARLAHRISKSKFSRYWRRWNRFCRRKCRAAVKSNVFYWLVIFLVFLNTLTIASEHYNQPNWLTEVQDTANKALLALFTAEMLLKMYSLGLQAYFVSLFNRFDCFVVCGGILETILVETKIMSPLGISVLRCVRLLRIFKITRYWNSLSNLVASLLNSVRSIASLLLLLFLFIIIFSLLGMQLFGGKFNFDEMQTRRSTFDNFPQSLLTVFQILTGEDWNSVMYDGIMAYGGPSFPGMLVCIYFIILFICGNYILLNVFLAIAVDNLADAESLTSAQKEEEEEKERKKLARTASPEKKQELVEKPAVGESKEEKIELKSITADGESPPATKINMDDLQPNENEDKSPYPNPETTGEEDEEEPEMPVGPRPRPLSELHLKEKAVPMPEASAFFIFSSNNRFRLQCHRIVNDTIFTNLILFFILLSSISLAAEDPVQHTSFRNHILFYFDIVFTTIFTIEIALKMTAYGAFLHKGSFCRNYFNILDLLVVSVSLISFGIQSSAINVVKILRVLRVLRPLRAINRAKGLKHVVQCVFVAIRTIGNIVIVTTLLQFMFACIGVQLFKGKLYTCSDSSKQTEAECKGNYITYKDGEVDHPIIQPRSWENSKFDFDNVLAAMMALFTVSTFEGWPELLYRSIDSHTEDKGPIYNYRVEISIFFIIYIIIIAFFMMNIFVGFVIVTFQEQGEQEYKNCELDKNQRQCVEYALKARPLRRYIPKNQHQYKVWYVVNSTYFEYLMFVLILLNTICLAMQHYGQSCLFKIAMNILNMLFTGLFTVEMILKLIAFKPKHYFCDAWNTFDALIVVGSIVDIAITEVNPAEHTQCSPSMNAEENSRISITFFRLFRVMRLVKLLSRGEGIRTLLWTFIKSFQALPYVALLIVMLFFIYAVIGMQVFGKIALNDTTEINRNNNFQTFPQAVLLLFRCATGEAWQDIMLACMPGKKCAPESEPSNSTEGETPCGSSFAVFYFISFYMLCAFLIINLFVAVIMDNFDYLTRDWSILGPHHLDEFKRIWAEYDPEAKGRIKHLDVVTLLRRIQPPLGFGKLCPHRVACKRLVSMNMPLNSDGTVMFNATLFALVRTALRIKTEGNLEQANEELRAIIKKIWKRTSMKLLDQVVPPAGDDEVTVGKFYATFLIQEYFRKFKKRKEQGLVGKPSQRNALSLQAGLRTLHDIGPEIRRAISGDLTAEEELDKAMKEAVSAASEDDIFRRAGGLFGNHVSYYQSDGRSAFPQTFTTQRPLHINKAGSSQGDTESPSHEKLVDSTFTPSSYSSTGSNANINNANNTALGRLPRPAGYPSTVSTVEGHGPPLSPAIRVQEVAWKLSSNRCHSRESQAAMAGQEETSQDETYEVKMNHDTEACSEPSLLSTEMLSYQDDENRQLTLPEEDKRDIRQSPKRGFLRSASLGRRASFHLECLKRQKDRGGDISQKTVLPLHLVHHQALAVAGLSPLLQRSHSPASFPRPFATPPATPGSRGWPPQPVPTLRLEGVESSEKLNSSFPSIHCGSWAETTPGGGGSSAARRVRPVSLMVPSQAGAPGRQFHGSASSLVEAVLISEGLGQFAQDPKFIEVTTQELADACDMTIEEMESAADNILSGGAPQSPNGALLPFVNCRDAGQDRAGGEEDAGCVRARGRPSEEELQDSRVYVSSL

SEQ ID NO: 62 - DNA, 2970 bp, Human
  CDS (502)...(2316): standard name = Beta-2C
cagcagcgtgctaagaagcagtcacataaacagcagcaggagtaggcctcctgcttttcaaaagcagagtactgcagggtcgcgaaatgcaagacactcagatgtttgaaaatctcccgagttgagaatggctactgtaaaagcgtcaccaagaaactctgacgatctggacagtcctaactctgtgttagcaatacttacttccggaaaattaatgctacttcttgtagatttttgcaaataggaaacccccttgaagaagatctcaaattacgccccccacccccaaaaaaagacaaacaggggagaacaaagttttggcatgcctgcaggaacggtggcttttttagaaactacctaggaggcagaagctaagtgatttgctcatgcctcttacctgggagtagaaggtgggaagaaatggaccgaggctgtgacgagaagacaaggcacagtgcagcttggtgaagccacacgctgactgcgttctgccccctcttcatgcagtgctgcgggctggtgcatcgccggcgagtacgggtgtcctatggttcggcagactcctacactagccgtccatccgattccgatgtatctctggaggaggaccgggaggcagtgcgcagagaagcggagcggcaggcccaggcacagttggaaaaagcaaagacaaagcccgttgcatttgcggttcggacaaatgtcagctacagtgcggcccatgaagatgatgttccagtgcctggcatggccatctcattcgaagcaaaagattttctgcatgttaaggaaaaatttaacaatgactggtggatagggcgattggtaaaagaaggctgtgaaatcggattcattccaagcccagtcaaactagaaaacatgaggctgcagcatgaacagagagccaagcaagggaaattctactccagtaaatcaggaggaaattcatcatccagtttgggtgacatagtacctagttccagaaaatcaacacctccatcatctgctatagacatagatgctactggcttagatgcagaagaaaatgatattccagcaaaccaccgctcccctaaacccagtgcaaacagtgtaacgtcaccccactccaaagagaaaagaatgcccttctttaagaagacagagcacactcctccgtatgatgtggtaccttccatgcgaccagtggtcctagtgggcccttctctgaagggctacgaggtcacagatatgatgcaaaaagcgctgtttgattttttaaaacacagatttgaagggcggatatccatcacaagggtcaccgctgacatctcgcttgccaaacgctcggtattaaacaatcccagtaagcacgcaataatagaaagatccaacacaaggtcaagcttagcggaagttcagagtgaaatcgaaaggatttttgaacttgcaagaacattgcagttggtggtccttgacgcggatacaattaatcatccagctcaactcagtaaaacctccttggcccctattatagtatatgtaaagatttcttctcctaaggttttacaaaggttaataaaatctcgagggaaatctcaagctaaacacctcaacgtccagatggtagcagctgataaactggctcagtgtcctccagagctgttcgatgtgatcttggatgagaaccagcttgaggatgcctgtgagcaccttgccgactatctggaggcctactggaaggccacccatcctcccagcagtagcctccccaaccctctccttagccgtacattagccacttcaagtctgcctcttagccccaccctagcctctaattcacagggttctcaaggtgatcagaggactgatcgctccgctcctatccgttctgcttcccaagctgaagaagaacctagtgtggaaccagtcaagaaatcccagcaccgctcttcctcctcagccccacaccacaaccatcgcagtgggacaagtcgcggcctctccaggcaagagacatttgactcggaaacccaggagagtcgagactctgcctacgtagagccaaaggaagattattcccatgaccacgtggaccactatgcctcacaccgtgaccacaaccacagagacgagacccacgggagcagtgaccacagacacagggagtcccggcaccgttcccgggacgtggatcgagagcaggaccacaacgagtgcaacaagcagcgcagccgtcataaatccaaggatcgctactgtgaaaaggatggagaagtgatatcaaaaaaacggaatgaggctggggagtggaacagggatgtttacatcccccaatgagttttgcccttttgtgtttttttttttttttttttgaagtcttgtataactaacagcatccccaaaacaaaaagtctttggggtctacactgcaatcatatgtgatctgtcttgtaatattttgtattattgctgttgcttgaatagcaatagcatggatagagtattgagatactttttcttttgtaagtgctacataaattggcctggtatggctgcagtcctccggttgcatactggactcttcaaaaactgttttgggtagctgccacttgaacaaaatctgttgccacccaggtgatgttagtgttttaagaaatgtagttgatgtatccaacaagccagaatcagcacagataaaaagtggaatttcttgtttctccagatttttaatacgttaatacgcaggcatctgatttgcatattcattcatggaccactgtttcttgcttgtacctctggctgactaaatttggggacagattcagtcttgccttacacaaaggggatcataaagttagaatctattttctatgtactagtactgtgtactgtatagacagtttgtaaatgttatttctgcaaacaaacacctccttattatatataatatatatatatatatcagtttgatcacactattttagagtc

SEQ ID NO: 63 - protein, 605 aa, Human
MQCCGLVHRRRVRVSYGSADSYTSRPSDSDVSLEEDREAVRREAERQAQAQLEKAKTKPVAFAVRTNVSYSAAHEDDVPVPGMAISFEAKDFLHVKEKFNNDWWIGRLVKEGCEIGFIPSPVKLENMRLQHEQRAKQGKFYSSKSGGNSSSSLGDIVPSSRKSTPPSSAIDIDATGLDAEENDIPANHRSPKPSANSVTSPHSKEKRMPFFKKTEHTPPYDVVPSMRPVVLVGPSLKGYEVTDMMQKALFDFLKHRFEGRISITRVTADISLAKRSVLNNPSKHAIIERSNTRSSLAEVQSEIERIFELARTLQLVVLDADTINHPAQLSKTSLAPIIVYVKISSPKVLQRLIKSRGKSQAKHLNVQMVAADKLAQCPPELFDVILDENQLEDACEHLADYLEAYWKATHPPSSSLPNPLLSRTLATSSLPLSPTLASNSQGSQGDQRTDRSAPIRSASQAEEEPSVEPVKKSQHRSSSSAPHHNHRSGTSRGLSRQETFDSETQESRDSAYVEPKEDYSHDHVDHYASHRDHNHRDETHGSSDHRHRESRHRSRDVDREQDHNECNKQRSRHKSKDRYCEKDGEVISKKRNEAGEWNRDVYIPQ

SEQ ID NO: 64 - DNA, 2712 bp, Human
  CDS (223)...(2061): standard name = Beta-2E
agtgtgtgttttcagcccctcctggaatgggaaaataagaatctccctggatgggagtcctctggggcagggagtgaaagccccggaggcagaaagggacggagaacaggggcttgcccagagcatggataggaaaggagctggggttctccggggctcagcgcgcactgagaacctgtgcccggggctgcagctgcggacgataaaggcgctgtctggctcatgaaggccacctggatcaggcttctgaaaagagccaagggaggaaggctgaagaattctgatatctgtggttcggcagactcctacactagccgtccatccgattccgatgtatctctggaggaggaccgggaggcagtgcgcagagaagcggagcggcaggcccaggcacagttggaaaaagcaaagacaaagcccgttgcatttgcggttcggacaaatgtcagctacagtgcggcccatgaagatgatgttccagtgcctggcatggccatctcattcgaagcaaaagattttctgcatgttaaggaaaaatttaacaatgactggtggatagggcgattggtaaaagaaggctgtgaaatcggattcattccaagcccagtcaaactagaaaacatgaggctgcagcatgaacagagagccaagcaagggaaattctactccagtaaatcaggaggaaattcatcatccagtttgggtgacatagtacctagttccagaaaatcaacacctccatcatctgctatagacatagatgctactggcttagatgcagaagaaaatgatattccagcaaaccaccgctcccctaaacccagtgcaaacagtgtaacgtcaccccactccaaagagaaaagaatgcccttctttaagaagacagagcacactcctccgtatgatgtggtaccttccatgcgaccagtggtcctagtgggcccttctctgaagggctacgaggtcacagatatgatgcaaaaagcgctgtttgattttttaaaacacagatttgaagggcggatatccatcacaagggtcaccgctgacatctcgcttgccaaacgctcggtattaaacaatcccagtaagcacgcaataatagaaagatccaacacaaggtcaagcttagcggaagttcagagtgaaatcgaaaggatttttgaacttgcaagaacattgcagttggtggtccttgacgcggatacaattaatcatccagctcaactcagtaaaacctccttggcccctattatagtatatgtaaagatttcttctcctaaggttttacaaaggttaataaaatctcgagggaaatctcaagctaaacacctcaacgtccagatggtagcagctgataaactggctcagtgtcctccagagctgttcgatgtgatcttggatgagaaccagcttgaggatgcctgtgagcaccttgccgactatctggaggcctactggaaggccacccatcctcccagcagtagcctccccaaccctctccttagccgtacattagccacttcaagtctgcctcttagccccaccctagcctctaattcacagggttctcaaggtgatcagaggactgatcgctccgctcctatccgttctgcttcccaagctgaagaagaacctagtgtggaaccagtcaagaaatcccagcaccgctcttcctcctcagccccacaccacaaccatcgcagtgggacaagtcgcggcctctccaggcaagagacatttgactcggaaacccaggagagtcgagactctgcctacgtagagccaaaggaagattattcccatgaccacgtggaccactatgcctcacaccgtgaccacaaccacagagacgagacccacgggagcagtgaccacagacacagggagtcccggcaccgttcccgggacgtggatcgagagcaggaccacaacgagtgcaacaagcagcgcagccgtcataaatccaaggatcgctactgtgaaaaggatggagaagtgatatcaaaaaaacggaatgaggctggggagtggaacagggatgtttacatcccccaatgagttttgcccttttgtgtttttttttttttttttttgaagtcttgtataactaacagcatccccaaaacaaaaagtctttggggtctacactgcaatcatatgtgatctgtcttgtaatattttgtattattgctgttgcttgaatagcaatagcatggatagagtattgagatactttttcttttgtaagtgctacataaattggcctggtatggctgcagtcctccggttgcatactggactcttcaaaaactgttttgggtagctgccacttgaacaaaatctgttgccacccaggtgatgttagtgttttaagaaatgtagttgatgtatccaacaagccagaatcagcacagataaaaagtggaatttcttgtttctccagatttttaatacgttaatacgcaggcatctgatttgcatattcattcatggaccactgtttcttgcttgtacctctggctgactaaatttggggacagattcagtcttgccttacacaaaggggatcataaagttagaatctattttctatgtactagtactgtgtactgtatagacagtttgtaaatgttatttctgcaaacaaacacctccttattatatataatatatatatatatatcagtttgatcacactattttagagtc

SEQ ID NO: 65 - protein, 612 aa, Human [sequence omitted]
